(19) United States
(12) Patent Application Publication
(10) Pub. No.: US 2014/0099317 A1
(43) Pub. Date: Apr. 10, 2014

(54) ANTIBODY POLYPEPTIDES THAT ANTAGONIZE CD40

(71) Applicants: Anish Suri, Yardley, PA (US); Steven Sheriff, Princeton, NJ (US); Suzanne Suchard, Wilmington, DE (US); Aaron Yamniuk, Lawrenceville, NJ (US); Stanley Krystek, Ringoes, NJ (US); James Tamura, Yardley, PA (US); James Bryson, Langhorne, PA (US); Steven Grant, Swaffham Prior (GB); Philip Drew, Histon (GB)

(72) Inventors: Anish Suri, Yardley, PA (US); Steven Sheriff, Princeton, NJ (US); Suzanne Suchard, Wilmington, DE (US); Aaron Yamniuk, Lawrenceville, NJ (US); Stanley Krystek, Ringoes, NJ (US); James Tamura, Yardley, PA (US); James Bryson, Langhorne, PA (US); Steven Grant, Swaffham Prior (GB); Philip Drew, Histon (GB)

(73) Assignees: DOMANTIS LIMITED, Brentford, Middlesex (UK); BRISTOL-MYERS SQUIBB COMPANY, Princeton, NJ (US)

(21) Appl. No.: 14/112,049

(22) PCT Filed: Apr. 20, 2012
(86) PCT No.: PCT/US2012/034519

§ 371 Date: Dec. 18, 2013

Related U.S. Application Data
(60) Provisional application No. 61/477,904, filed on Apr. 21, 2011.

(51) Int. Cl. C07K 16/28

(52) U.S. Cl. CPC C07K 16/2878
USPC 424/139.1; 530/387.9; 530/387.3; 536/23.53; 435/252.33

(57) ABSTRACT

Antibody polypeptides that specifically bind a novel epitope of human CD40 are provided. The antibody polypeptides do not exhibit CD40 agonist activity. The antibody polypeptides are useful in the treatment of diseases involving CD40 activation, such as autoimmune diseases. The antibody polypeptides may be domain antibodies (dAbs) comprising a single V_{L} or V_{H} domain. The half-life of the antibody polypeptides may be increased by modifying the antibody polypeptides to be dual specific reagents that can also bind human serum albumin (HSA).

### CROSS-REFERENCE TO RELATED APPLICATIONS

[0001] The instant application claims the benefit of U.S. Provisional Application No. 61/477,904, filed Apr. 21, 2011, the entire contents of which are herein incorporated by reference.

### TECHNICAL FIELD

[0002] Antibodies and fragments thereof that target CD40, and do not exhibit CD40 agonist activity, compositions comprising the same, and methods of using the same for treatment of diseases involving CD40 activity are provided.

### SEQUENCE LISTING

[0003] The instant application contains a Sequence Listing in ASCII format and is hereby incorporated by reference in its entirety. Said ASCII copy, created on Apr. 20, 2012, is named 200896WO.txt and is 1,188,533 bytes in size.

### BACKGROUND

[0004] CD40 is a co-stimulatory molecule belonging to the tumor necrosis factor (TNF) receptor superfamily that is present on antigen presenting cells (APC), including dendritic cells, B cells, and macrophages. APCs are activated when CD40 binds its ligand, CD154 (CD40L), on T_{H} cells. CD40-mediated APC activation is involved in a variety of immune responses, including cytokine production, up-regulation of co-stimulatory molecules (such as CD86), and enhanced antigen presentation and B cell proliferation. CD40 can also be expressed by endothelial cells, smooth muscle cells, fibroblasts, and epithelial cells.

[0005] CD40 activation is also involved in a variety of undesired T cell responses related to autoimmunity, transplant rejection, or allergic responses, for example. One strategy for controlling undesirable T cell responses is to target CD40 with an antagonistic antibody. For example, monoclonal antibody HCD122 (Lucatumumab), formerly known as Chiron 1212, is currently in clinical trials for the treatment of certain CD40-mediated inflammatory diseases. See “Study of HCD122 (Lucatumumab) and Bendamustine Combination Therapy in CD40⁺ Rituximab-Refractory Follicular Lymphoma,” Clinical Trials Feeds, on the Internet at hypertext transfer protocol: clinicaltrialsfeeds.org/clinical-trials/show/NCT01275209 (last updated Jan. 11, 2011). Monoclonal antibodies, however, can display agonist activity. For example, the usefulness of the anti-CD40 antibody Chi220 is limited by its weak stimulatory potential. See Adams, et al., “Development of a chimeric anti-CD40 monoclonal antibody that synergizes with LEA29Y to prolong islet allograft survival,” J. Immunol. 174: 542-50 (2005).

### SUMMARY

[0006] Anti-CD40 antibody antagonists that do not possess partial agonist activity are still needed in a clinical setting. Novel antibody polypeptides that specifically bind a novel epitope of human CD40 are provided. The CD40 epitope does not overlap the Chi220 epitope, as shown by competition analysis and by the structure derived from co-crystallization of an antibody polypeptide with CD40. The antibody polypeptides advantageously do not exhibit CD40 agonist activity. The antibody polypeptides are useful in the treatment of diseases involving CD40 activation, including autoimmune diseases, transplant rejection, and allergic responses. The antibody polypeptides comprise a variable domain. In one embodiment, the antibody polypeptides are in the form of a domain antibody (dAb) that contains a single variable domain. In another embodiment, the dAbs are bi-specific reagents that comprise a second variable domain that can bind human serum albumin (HSA), for example.

[0007] Provided is an antibody polypeptide comprising a first variable domain, where said antibody polypeptide specifically binds an epitope of human CD40, where the epitope comprises the amino acid sequence of SEQ ID NO: 1, where the antibody polypeptide competes with the binding of domain antibody (dAb) BMS3h-56-269 (SEQ ID NO: 417), and where the epitope comprises at least one CD40 amino acid residue selected from the group consisting of Trp109, Leu121, His122, Ser124, Ser156, Ala157, Phe158, Glu159, and His162.

[0008] Further provided is an antibody polypeptide where the first variable domain comprises the amino acid sequence of one of the antibody polypeptides selected from the lineage group consisting of BMS3h-37, BMS3h-38, BMS3h-56, and BMS3h-198, and where the first variable domain has an apparent binding constant of 1 pM to 100 nM. Further provided is an antibody polypeptide where the first variable domain has an apparent binding constant of 1 pM to 10 nM.

[0009] Also provided is an antibody polypeptide where the amino acid sequence of the first variable domain comprises (a) a CDR1 region which differs from the CDR1 region of BMS3h-56-269 (SEQ ID NO: 417) by up to two amino acids, (b) a CDR2 region which differs from the CDR2 region of BMS3h-56-269 (SEQ ID NO: 417) by up to two amino acids, (c) a CDR3 region which differs from the CDR3 region of BMS3h-56-269 (SEQ ID NO: 417) by up to two amino acids, (d) a FR1 region which differs from the FR1 region of BMS3h-56-269 (SEQ ID NO: 417) by up to two amino acids, (e) a FR2 region which differs from the FR2 region of BMS3h-56-269 (SEQ ID NO: 417) by up to two amino acids, (f) a FR3 region which differs from the FR3 region of BMS3h-56-269 (SEQ ID NO: 417) by up to two amino acids, and (g) a FR4 region which differs from the FR4 region of BMS3h-56-269 (SEQ ID NO: 417) by up to two amino acids.

[0010] Also provided is an antibody polypeptide where the amino acid sequence of the first variable domain comprises (a) a CDR1 region which differs from the CDR1 region of BMS3h-56-269 (SEQ ID NO: 417) by up to two amino acids, (b) a CDR2 region which differs from the CDR2 region of BMS3h-56-269 (SEQ ID NO: 417) by up to two amino acids, (c) a CDR3 region which differs from the CDR3 region of BMS3h-56-269 (SEQ ID NO: 417) by up to two amino acids.

[0011] Further provided is an antibody polypeptide where the amino acid sequence of the first variable domain differs from the amino acid sequence of BMS3h-56-258 (SEQ ID NO: 10) or BMS3h-56-269 (SEQ ID NO: 417) by up to 10 amino acids.

[0012] Further provided is an antibody polypeptide where the amino acid sequence of the first variable domain differs from the amino acid sequence of BMS3h-56-258 (SEQ ID NO: 10) or BMS3h-56-269 (SEQ ID NO: 417) by up to 5 amino acids.

[0013] Further provided is an antibody polypeptide where the amino acid sequence of the first variable domain differs from the amino acid sequence of BMS3h-56-258 (SEQ ID NO: 10) or BMS3h-56-269 (SEQ ID NO: 417) by two amino acids.

[0014] Further provided is an antibody polypeptide where the amino acid sequence of the first variable domain differs from the amino acid sequence of BMS3h-56-258 (SEQ ID NO: 10) or BMS3h-56-269 (SEQ ID NO: 417) by one amino acid.

[0015] Further provided is an antibody polypeptide where the antibody polypeptide is selected from the lineage group of BMS3h-56, and where the amino acid sequence of the first variable domain further comprises: (a) a CDR1 region having a sequence X₁-Tyr-Glu-Y₁-Trp (SEQ ID NO: 1274), where X₁ is Asp or Gly, and Y₁ is Met or Leu; (b) a CDR2 region having a sequence Ala-Ile-Asn-Pro-X₂-Gly-Y₂-Z₂-Thr-Tyr-Tyr-Ala-Asp-Ser-Val-A₂-Gly (SEQ ID NO: 1275), where X₂ is Gln, Tyr, Pro, Trp, or Ala, Y₂ is Thr, Ser, Asn, Gly, Met, or Gln, Z₂ is Arg, Leu, Tyr, His, or Phe, and A₂ is Lys or Met; and (c) a CDR3 region having a sequence X₃-Pro-Y₃-Z₃-Phe-A₃-B₃ (SEQ ID NO: 1276), where X₃ is Leu or Pro, Y₃ is Phe, Gln, Thr, or Met, Z₃ is Tyr, Pro, Leu, Thr, Ile, Phe, or Met, A₃ is Gln, His, Asp, Ser, Lys, Glu, or Gly, and B₃ is Glu, Asp, or Tyr.

[0016] Further provided is an antibody polypeptide where the amino acid sequence of the first variable domain comprises: (a) a FR1 region having a sequence Glu-Val-Gln-Leu-Leu-Glu-Ser-Gly-Gly-Gly-Leu-Val-Gln-Pro-Gly-Gly-Ser-X₁-Arg-Leu-Ser-Cys-Ala-Ala-Ser-Gly-Phe-Thr-Phe-Y₁ (SEQ ID NO: 1277), where X₁ is Leu or Arg, and Y₁ is Arg or Ala; (b) a FR2 region having a sequence Trp-Val-Arg-X₂-Ala-Pro-Gly-Y₂-Z₂-Leu-Glu-Arg-Val-Ser (SEQ ID NO: 1278), where X₂ is Gln or Arg, Y₂ is Lys or Arg, and Z₂ is Gly or Val; (c) a FR3 region having a sequence Arg-Phe-Thr-Ile-Ser-Arg-Asp-Asn-Ser-Lys-Asn-X₃-Lys-Tyr-Leu-Gln-Met-Asn-Ser-Leu-Arg-Ala-Y₃-Asp-Thr-Z₃-Val-Tyr-A₃-Cys-B₃-Lys (SEQ ID NO: 1279), where X₃ is Thr or Met, Y₃ is Glu or Asp, Z₃ is Ala or Ser, A₃ is Tyr or His, and B₃ is Ala or Thr; and (d) a FR4 region having a sequence X₄-Gly-Y₄-Gly-Thr-Leu-Val-Thr-Val-Ser-Z₄ (SEQ ID NO: 1280), where X₄ is Trp or Arg, Y₄ is Gln or Pro, and Z₄ is Ser or Asn.

[0017] Further provided is an antibody polypeptide where the first variable domain comprises the amino acid sequence of BMS3h-56-258 (SEQ ID NO: 10) or BMS3h-56-269 (SEQ ID NO:417).

[0018] Further provided is an antibody polypeptide where the antibody polypeptide is selected from the lineage group of BMS3h-37, where the first variable domain comprises the sequence Glu-Val-Gln-Leu-Leu-Glu-Ser-Gly-Gly-Gly-Leu-Val-X₁-Pro-Gly-Gly-Ser-Leu-Arg-Leu-Ser-Cys-Ala-Ala-Ser-Gly-Phe-Thr-Phe-Glu-Trp-Tyr-Glu-Met-Gln-Trp-Val-Arg-Arg-Ala-Pro-Gly-Lys-Gly-Leu-Glu-Trp-Val-Ser-Ala-Ile-Ser-Gly-Asp-Gly-Tyr-Arg-Thr-Tyr-Tyr-Ala-Asp-Ser-Val-Lys-Gly-Arg-Phe-Thr-Ile-Ser-Arg-Asp-Asn-Ser-Lys-Asn-Thr-Leu-Tyr-Leu-Gln-Met-Asn-Ser-Leu-Arg-Ala-Glu-Asp-Thr-Ala-Val-Tyr-Tyr-Cys-Ala-Lys-Y₁-Leu-Z₁-A₁-Phe-Asp-Tyr-B₁-Gly-Arg-Gly-Thr-Leu-Val-Thr-Val-Ser-Ser (SEQ ID NO: 1281); and where X₁ is Gln or Arg; Y₁ is Glu or Gly; Z₁ is Ala, Leu, or Glu; A₁ is Phe or Tyr; and B₁ is Trp or Arg.

[0019] Also provided is an antibody polypeptide where the antibody polypeptide is selected from the lineage group of BMS3h-38, where the first variable domain comprises the sequence Glu-Val-Gln-Leu-Leu-Ala-Ser-Gly-Gly-Gly-Leu-Val-Gln-Pro-Gly-Gly-Ser-Leu-Arg-Leu-Ser-Cys-Ala-Ala-Ser-Gly-Phe-X₁-Phe-Glu-Glu-Glu-Glu-Met-Ile-Trp-Val-Arg-Gln-Ala-Pro-Gly-Lys-Gly-Leu-Glu-Trp-Val-Ser-Y₁-Ile-Ser-Z₁-A₁-Gly-B₁-C₁-Thr-Tyr-Tyr-Ala-Asp-Ser-Val-Lys-Gly-Arg-Phe-Thr-Ile-Ser-Arg-Asp-Asn-Ser-Lys-Asn-Thr-Leu-Tyr-Leu-Gln-Met-Asn-Ser-Leu-Arg-Ala-Glu-Asp-Thr-Ala-Val-Tyr-Tyr-Cys-Gly-Lys-Glu-Pro-Phe-D₁-Tyr-Asp-Tyr-Trp-Gly-Gln-Gly-Thr-Leu-Val-Thr-Val-Ser-Ser (SEQ ID NO: 1282); and where X₁ is Thr or Pro; Y₁ is Ala or Ser; Z₁ is Arg or Gly; A₁ is Arg, Ser, Asn, Gln, Gly, His, or Leu; B₁ is Tyr, Phe, Trp, or Gly; C₁ is Ser or Gly; and D₁ is Arg, Met, or Pro.

[0020] Also provided is an antibody polypeptide where the antibody polypeptide is selected from the lineage group of BMS3h-198, where the first variable domain comprises the sequence Glu-Val-Gln-Leu-Leu-Glu-Ser-Gly-Gly-Gly-Leu-Val-Gln-Pro-Gly-Gly-Ser-Leu-Arg-Leu-Ser-Cys-Ala-Ala-Ser-Gly-Phe-Thr-Phe-Ala-Gly-Try-Glu-X₁-Trp-Trp-Y₁-Arg-Gln-Ala-Pro-Gly-Lys-Gly-Leu-Glu-Arg-Val-Ser-Ala-Ile-Ser-Gly-Ser-Gly-Gly-Ser-Thr-Tyr-Tyr-Ala-Asp-Ser-Val-Lys-Gly-Arg-Phe-Thr-Ile-Ser-Arg-Asp-Z₁-A₁-Lys-Asn-Thr-Leu-Tyr-Leu-Gln-Met-Asn-Ser-Leu-Arg-Ala-Glu-Asp-Thr-Ala-Val-Tyr-B₁-Cys-Ala-C₁-D₁-Pro-Tyr-Ser-E₁-Asp-Tyr-F₁-G₁-H₁-Gly-Tbr-Leu-Val-Thr-Val-Ser-Ser (SEQ ID NO: 1283); and where X₁ is Met or Leu; Y₁ is Val or Phe; Z₁ is Asp or Asn; A₁ is Ser or Thr; B₁ is Tyr or His; C₁ is Lys or Arg; D₁ is Asp or Glu; E₁ is Tyr or Phe; F₁ is Trp or Arg; G₁ is Gly or Arg; and H₁ is Gln or His.

[0021] Further provided is an antibody polypeptide where the antibody polypeptide is a domain antibody (dAb).

[0022] Further provided is an antibody polypeptide where the variable domain is fused to an Fc domain.

[0023] Further provided is an antibody polypeptide where the antibody polypeptide further comprises a second variable domain that specifically binds a second antigen, where the second antigen is an antigen other than human CD40.

[0024] Also provided is an antibody polypeptide where the second antigen is a cluster of differentiation (CD) molecule or a Major Histocompatibility Complex (MHC) Class II molecule.

[0025] Also provided is an antibody polypeptide where the second antigen is serum albumin (SA).

[0026] Provided is a nucleic acid encoding the antibody polypeptide disclosed herein.

[0027] Also provided is a vector comprising the nucleic acid disclosed herein.

[0028] Also provided is a host cell comprising the vector disclosed herein.

[0029] Provided is a pharmaceutical composition comprising a therapeutically-effective amount of the antibody polypeptide disclosed herein and a pharmaceutically acceptable carrier. Also provided is a pharmaceutical composition further comprising an immunosuppressive/immunomodulatory and/or anti-inflammatory agent.

[0030] Provided is a method of treating an immune disease in a patient in need of such treatment, comprising administering to the patient a therapeutically effective amount of the pharmaceutical composition disclosed herein. Also provided is a method where the pharmaceutical composition is administered in combination with an immunosuppressive/immunomodulatory and/or anti-inflammatory agent.

[0031] Provided is a method of treating an immune disease where the immune disease is an autoimmune disease or a graft-related disease. Further provided is a method of treating an immune disease where the immune disease is selected from the group consisting of selected from the group consisting of Addison's disease, allergies, ankylosing spondylitis, asthma, atherosclerosis, autoimmune diseases of the ear, autoimmune diseases of the eye, autoimmune hepatitis, autoimmune parotitis, colitis, coronary heart disease, Crohn's disease, diabetes, including Type 1 and/or Type 2 diabetes, epididymitis, glomerulonephritis, Graves' disease, Guillain-Barre syndrome, Hashimoto's disease, hemolytic anemia, idiopathic thrombocytopenic purpura, inflammatory bowel disease, immune response to recombinant drug products, systemic lupus erythematosus, male infertility, multiple sclerosis, myasthenia gravis, pemphigus, psoriasis, rheumatic fever, rheumatoid arthritis, sarcoidosis, scleroderma, Sjogren's syndrome, spondyloarthropathies, thyroiditis, transplant rejection, vasculitis, AIDS, atopic allergy, bronchial asthma, eczema, leprosy, schizophrenia, inherited depression, transplantation of tissues and organs, chronic fatigue syndrome, Alzheimer's disease, Parkinson's disease, myocardial infarction, stroke, autism, epilepsy, Arthus's phenomenon, anaphylaxis, alcohol addiction, and drug addiction.

[0032] Also provided is a method of targeting CD40 using a first variable domain that specifically binds an epitope of human CD40 comprising the amino acid sequence of SEQ ID NO: 1, where the antibody polypeptide competes with the binding of domain antibody (dAb) BMS3h-56-269 (SEQ ID NO:417).

[0033] Provided is the use in medicine of an antibody polypeptide comprising a first variable domain that specifically binds an epitope of human CD40 comprising the amino acid sequence of SEQ ID NO: 1, wherein the antibody polypeptide competes with the binding of domain antibody (dAb) BMS3h-56-201 (SEQ ID NO: 9), or a pharmaceutically acceptable salt thereof.

[0034] Provided is the use of an antibody polypeptide comprising a first variable domain that specifically binds an epitope of human CD40 comprising the amino acid sequence of SEQ ID NO: 1, wherein the antibody polypeptide competes with the binding of domain antibody (dAb) BMS3h-56-201 (SEQ ID NO: 9), or a pharmaceutically acceptable salt thereof, in the preparation of a medicament for treatment of an immune disease. In some embodiments, the pharmaceutical composition is administered in combination with an immunosuppressive/immunomodulatory and/or anti-inflammatory agent. In further embodiments, the immune disease is an autoimmune disease or a graft-related disease. In yet further embodiments, the immune disease is selected from the group consisting of selected from the group consisting of Addison's disease, allergies, ankylosing spondylitis, asthma, atherosclerosis, autoimmune diseases of the ear, autoimmune diseases of the eye, autoimmune hepatitis, autoimmune parotitis, colitis, coronary heart disease, Crohn's disease, diabetes, including Type 1 and/or Type 2 diabetes, epididymitis, glomerulonephritis, Graves' disease, Guillain-Barre syndrome, Hashimoto's disease, hemolytic anemia, idiopathic thrombocytopenic purpura, inflammatory bowel disease, immune response to recombinant drug products, systemic lupus erythematosus, male infertility, multiple sclerosis, myasthenia gravis, pemphigus, psoriasis, rheumatic fever, rheumatoid arthritis, sarcoidosis, scleroderma, Sjogren's syndrome, spondyloarthropathies, thyroiditis, transplant rejection, vasculitis, AIDS, atopic allergy, bronchial asthma, eczema, leprosy, schizophrenia, inherited depression, transplantation of tissues and organs, chronic fatigue syndrome, Alzheimer's disease, Parkinson's disease, myocardial infarction, stroke, autism, epilepsy, Arthus's phenomenon, anaphylaxis, alcohol addiction, and drug addiction.

[0035] Provided is an antibody polypeptide comprising a first variable domain that specifically binds an epitope of human CD40 comprising the amino acid sequence of SEQ ID NO: 1, wherein the antibody polypeptide competes with the binding of domain antibody (dAb) BMS3h-56-201 (SEQ ID NO: 9), or a pharmaceutically acceptable salt thereof, for use in the preparation of a medicament for treatment of an immune disease. The medicament can, for example, be administered in combination with an immunosuppressive/immunomodulatory and/or anti-inflammatory agent. The immune disease can be, for example, an autoimmune disease or a graft-related disease. The immune disease can also be selected from the group consisting of selected from the group consisting of Addison's disease, allergies, ankylosing spondylitis, asthma, atherosclerosis, autoimmune diseases of the ear, autoimmune diseases of the eye, autoimmune hepatitis, autoimmune parotitis, colitis, coronary heart disease, Crohn's disease, diabetes, including Type 1 and/or Type 2 diabetes, epididymitis, glomerulonephritis, Graves' disease, Guillain-Barre syndrome, Hashimoto's disease, hemolytic anemia, idiopathic thrombocytopenic purpura, inflammatory bowel disease, immune response to recombinant drug products, systemic lupus erythematosus, male infertility, multiple sclerosis, myasthenia gravis, pemphigus, psoriasis, rheumatic fever, rheumatoid arthritis, sarcoidosis, scleroderma, Sjogren's syndrome, spondyloarthropathies, thyroiditis, transplant rejection, vasculitis, AIDS, atopic allergy, bronchial asthma, eczema, leprosy, schizophrenia, inherited depression, transplantation of tissues and organs, chronic fatigue syndrome, Alzheimer's disease, Parkinson's disease, myocardial infarction, stroke, autism, epilepsy, Arthus's phenomenon, anaphylaxis, alcohol addiction, and drug addiction.

### BRIEF DESCRIPTION OF THE FIGURES

[0036] The patent or application file contains at least one drawing executed in color. Copies of this patent or patent application publication with color drawing(s) will be provided by the Office upon request and payment of the necessary fee.

[0037] FIG. 1 depicts the binding modes of two different co-crystal structures of human CD40 (SEQ ID NO: 1), one with the dAb BMS3h-56-5 (SEQ ID NO: 321) and one with the Fab′ of Chi220 antibody. The BMS3h-56-5 and Chi 220 Fab′ molecules are shown as cartoons with β-strands (represented as arrows in the dAb) and non-repetitive secondary structure (represented as loops in th dAb). Complementarity-determining regions (CDRs) are also shown CD40 is also shown as a cartoon with the BMS3h-56-5 epitope residues of human CD40. The Chi220 epitope residues are also shown. Disulfide bonds are also shown The N-terminus (N) and C-terminus (C) of CD40 are labeled.

[0038] FIG. 2 depicts a space filling model of BMS3h-56-5 (SEQ ID NO: 321) contacting human CD40 (SEQ ID NO: 1), which is shown as a cartoon. Surface residues of the dAb BMS3h-56-5 that contact CD40 are shown. The BMS3h-56-5 CDR3 region and FR-2 residues Leu45, Arg47, Arg56 and Phe99 are labeled. Kabat numbering (Kabat et al., Sequences of Immunological Interest, 5^{th} ed., U.S. Dept. Health & Human Services, Washington, D.C. (1991)) is used in this diagram and differs from sequential numbering in that insertion residues are used to keep the residue numbering of the β-strands identical. Thus for BMS3h-56-5, sequential residue 53 becomes residue 52A, sequential residues 84, 85, and 86 become, respectively, 82A, 82B, 82C and Kabat residue number 100 is missing (it would be between sequential residues 103 and 104); CD40 is also represented as a cartoon with non-repetitive secondary structure and the BMS3h-56-5 epitope. CD40 residues that differ between human and Macaca fascicularis (cynomolgus monkey), Ala115, Phe99, Ser126, His162, Leu121, and Trp109, are shown in stick representation. CD40 residues that differ between human and cynomolgus monkey that are part of the BMS3h-56-5 epitope are Trp109, Leu121, and His162. CD40 residues Trp109 and Leu121 lie in a cleft between the BMS3h-56-5 CDR3 and FR-2. Mutation of Trp 109 either greatly reduces or ablates BMS3h-56-5 activity.

[0039] FIG. 3 depicts binding of a PEGylated anti-human CD40 dAb, BMS3h38-2C-P40Br, on blood samples from human and primate species. FIG. 3A shows BMS3h38-2C-P40Br binding to human and cynomolgus B cells; FIG. 3B shows BMS3h38-2C-P40Br binding to human, rhesus, and chimp B cells.

[0040] FIG. 4, FIG. 5, FIG. 6, and FIG. 7 show ClustalW2 alignments of representative domain antibody polypeptides from lineages BMS3h-56, BMS3h-37, BMS3h-38, and BMS3h-198, respectively.

### DETAILED DESCRIPTION

[0041] Antibody polypeptides that specifically bind to human CD40 are provided. The antibody polypeptides do not exhibit CD40 agonist activity, and the antibody polypeptides are useful in the treatment of diseases involving CD40 activation, such as autoimmune diseases. The antibody polypeptides may be selected using a primary screen that utilizes cell binding assays, followed by one or more rounds of error-prone or degenerate oligonucleotide-directed affinity maturation. As a result, a genus of antibody polypeptides that specifically bind a single CD40 epitope are provided.

[0042] A “lineage” is a set of related antibody polypeptides that were prepared from a common precursor by error-prone or degenerate oligonucleotide-directed affinity maturation, as disclosed in the examples below, and that are expected to bind the same CD40 epitope. The nomenclature of the antibody polypeptides is used to designate the various lineages. The nomenclature “BMS3h-56,” for example, refers to antibody poly/peptides of lineage 56, which were raised against human CD40. “Lineage BMS3h-56” antibody polypeptides include BMS3h-56-1 through BMS3h-56-33, and BMS3h-56-202 through BMS3h-56-288.

[0043] Accordingly, in one aspect, an antibody polypeptide comprises a variable domain that specifically binds human CD40, where the antibody polypeptide competes with the binding of any one of the domain antibodies (dAbs) listed in TABLE 3. For example, the dAb may belong to a lineage selected from the group consisting of BMS3h-37, BMS3h-38, BMS3h-41, BMS3h-43, BMS3h-56, BMS3h-131, BMS3h-198, and BMS3h-202, such as the dAb BMS3h-56-5, BMS3h-56-201, or BMS3h-56-258, for instance. In another aspect, an antibody polypeptide specifically binds the same human CD40 epitope as any one of the dAbs listed in TABLE 3. For example, the antibody polypeptide may comprise a variable domain that specifically binds the same human CD40 epitope as the dAb BMS3h-56-5, BMS3h-56-201, or BMS3h-56-258, for instance. As disclosed below, the human CD40 epitope may comprise amino acid residue Trp109 of SEQ ID NO: 1, for example.

[0044] The antibody polypeptides may be domain antibodies containing a single variable domain. The antibody polypeptides also may comprise additional domains, such as an Fc domain. For instance, the antibody polypeptide may comprise a second variable domain that specifically binds human serum albumin (HSA). Such dual specific antibody polypeptides may have an increased half-life, for example.

[0045] In the Sequence Listing, SEQ ID NO: 1 is the amino acid sequence of human CD40; SEQ ID NO: 2 is the amino acid sequence of Macaca fascicularis CD40. The amino acid sequence of the domain antibody BMS3h-56-5 is SEQ ID NO: 321.

[0046] As used herein, “specific binding” refers to the binding of an antigen by an antibody polypeptide with a dissociation constant (K_{d}) of about 1 μM or lower as measured, for example, by surface plasmon resonance. Suitable assay systems include the BIAcore™ surface plasmon resonance system and BIAcore™ kinetic evaluation software (e.g., version 2.1). The affinity or K_{d} for a specific binding interaction may be about 500 nM or lower or about 300 nM or lower.

[0047] The term “about” will be understood by persons of ordinary skill in the art and will vary to some extent on the context in which it is used. Generally, about encompasses a range of values that are plus/minus 10% of a referenced value.

[0048] In accordance with this detailed description, the following abbreviations and definitions apply. It must be noted that as used herein, the singular forms “a”, “an”, and “the” include plural referents unless the context clearly dictates otherwise. Thus, for example, reference to “an antibody” includes a plurality of such antibodies and reference to “the dosage” includes reference to one or more dosages and equivalents thereof known to those skilled in the art, and so forth.

[0049] 1. CD40 and CD40 Activities

[0050] Antibody polypeptides are provided that bind human CD40. CD40 is also known as B-cell surface antigen CD40, Bp50, CD40L receptor, CDw40, CDW40, MGC9013, p50, TNFRSF5, and Tumor necrosis factor receptor superfamily member 5. Relevant structural information for human CD40 can be found, for example, at UniProt Accession Numbers P25942, Q9BYU0, and Q53GN5. “Human CD40” refers to the CD40 comprising the following amino acid sequence:

(SEQ ID NO: 1)

MVRLPLQCVL WGCLLTAVHP EPPTACREKQ YLINSQCCSL
CQPGQKLVSD CTEFTETECL PCGESEFLDT WNRETHCHQH
KYCDPNLGLR VQQKGTSETD TICTCEEGWH CTSEACESCV
LHRSCSPGFG VKQIATGVSD TICEPCPVGF FSNVSSAFEK
CHPWTSCETK DLVVQQAGTN KTDVVCGPQD RLRALVVIPI
IFGILFAILL VLVFIKKVAK KPTNKAPHPK QEPQEINFPD
DLPGSNTAAP VQETLHGCQP VTQEDGKESR ISVQERQ.

CD40 also has been sequenced in Mus musculus, Sus scrofa, Bos taurus, Gallus gallas, Canis familiaris, Macaca fascicularis (cynomolgus monkey), Ovis aries, Equus caballus, and Rattus norvegicus.

[0051] Binding of the present antibody polypeptides to CD40 antagonizes CD40 activity. “CD40 activities” include, but are not limited to, T cell activation (e.g., induction of T cell proliferation or cytokine secretion), macrophage activation (e.g., the induction of reactive oxygen species and nitric oxide in the macrophage), and B cell activation (e.g., B cell proliferation, antibody isotype switching, or differentiation to plasma cells). CD40 activities can be mediated by interaction with other molecules. “CD40 activities” include the functional interaction between CD40 and the following molecules, which are identified by their Uniprot Accession Number is parentheses:

| | |
|---|---|
| CALR | (P27797); |
| ERP44 | (Q9BS26); |
| FBL | (P22087); |
| POLR2H | (P52434); |
| RFC5 | (P40937); |
| SGK1 | (O00141); |
| SLC30A7 | (Q8NEW0); |
| SLC39A7 | (Q92504); |
| TRAF2 | (Q5T1L5); |
| TRAF3 | (Q13114); |
| TRAF6 | (Q9Y4K3); |
| TXN | (Q5T937); |
| UGGT1 | (Q9NYU2); and |
| USP15 | (Q9Y4E8). |

For example, a CD40 “activity” includes an interaction with TRAF2. CD40/TRAF2 interaction activates NF-κB and JNK. See Davies et al., Mol. Cell. Biol. 25: 9806-19 (2005). This CD40 activity thus can be determined by CD40-dependent cellular NF-κB and JNK activation, relative to a reference.

[0052] As used herein, the terms “activate,” “activates,” and “activated” refer to an increase in a given measurable CD40 activity by at least 10% relative to a reference, for example, at least 10%, 25%, 50%, 75%, or even 100%, or more. A CD40 activity is “antagonized” if the activity is reduced by at least 10%, and in an exemplary embodiment, at least about 20%, 30%, 40%, 50%, 60%, 70%, 80%, 90%, 95%, 97%, or even 100% (i.e., no detectable activity), relative to the absence of the antagonist. For example, an antibody polypeptide may antagonize some or all CD40 activity, while not activating CD40. In one embodiment, the antibody polypeptide does not activate B cell proliferation. In another embodiment, the antibody polypeptide does not activate cytokine secretion by T cells, where the cytokine is at least one cytokine selected from the group consisting of IL-2, IL-6, IL-10, IL-13, TNF-α, IFN-γ.

[0053] 2. The CD40 Epitope

[0054] X-ray crystallography of a complex between human CD40 (SEQ ID NO: 1) and the dAb BMS3h-56-5 (SEQ ID NO: 321) was used to reveal an epitope recognized by the antibody polypeptides of the disclosure. Structural models of CD40 and BMS3h-56-5 were fitted to electron density data to yield seven models or versions of the CD40/BMS3h-56-5 complex, which come from three crystallographically independent complexes in one crystal form and four crystallographically independent complexes in a second crystal form. The versions have real space correlation coefficients of about 0.92 for main-chain atoms and 0.80 for side-chain atoms. The CD40 molecule has a certain amount of flexibility in the seven versions, but the overall nature of the CD40/BMS3h-56-5 interaction is retained in all versions. The versions differ in the interaction between the CD40 residue Trp109 and BMS3h-56-5 Trp103 (Kabat Numbering, see below). BMS3h-56-5 Trp 103 forms an edge-to-face interaction with CD40 Trp109 in one version, while forming a displaced stacking (i.e., face-to-face) interaction in other versions.

[0055] The shape complementarity statistic, Sc, for the seven versions ranges from 0.70-0.77, which shows a higher degree of shape complementarity than for typical antibody/antigen complexes. For example, these values compare to ranges of 0.71-0.76 for four protease/protein inhibitor complexes, 0.70-0.74 for five oligomeric interfaces, and 0.64-0.68 for six antibody/antigen complexes. See Lawrence et al., “Shape Complementarity at Protein/Protein Interfaces,” J. Mol. Biol. 234: 946-950 (1993).

[0056] A model of the human CD40/BMS3H-56-5 complex is shown in FIG. 1. One BMS3h-56-5 dAb binds to one CD40 molecule. The BMS3h-56-5 epitope does not overlap the Chi220 Fab′ fragment epitope. All versions of the complex define a set of CD40 residues that contact BMS3h-56-5: Trp109, Leu121, His122, Ser124, Ser156, Ala157, Phe158, Glu159, and His162 (with reference to SEQ ID NO: 1). CD40 residues that contact BMS3h-56-5 in some versions of the complex are Pro85, Asn86, Leu87, Gly88, Glu106, Glu107, Gly108, His110, Thr112, Cys119, Val120, Gln133, Ile134, Ala135, Thr136, Ser155, and Lys160. Val154 is a buried CD40 residue in all versions. Other CD40 residues buried in some versions are Ser118, Arg123, Thr141, Phe151, Asp153, Cys161, and Pro163.

[0057] As used herein, the term “in contact” refers to an interatomic distance whose maximum is determined by an atom type distance dependency as defined by Sheriff et al., J. Mol. Biol. 197: 273-296 (1987) and Sheriff, Immunomethods 3: 191-196 (1993).

[0058] As used herein, the term “buried” refers to a residue that has a least one atom with surface area defined by the program MS (Connolly, J. Appl. Crystallogr. 16: 548-558 (1983)), a probe sphere of 1.7 Å, and atom type dependent Van der Waals radii as defined by Sheriff, Immunomethods 3: 191-196 (1993).

[0059] FIG. 2 shows the surface of BMS3h-56-5 (SEQ ID NO: 321) including contacting residues and buried residues. CD40 (SEQ ID NO: 1) is represented as a ribbon diagram with orange representing non-repetitive secondary structure and magenta representing the epitope residues. CD40 residues Trp109, Ala115, Leu121, Ser126, and His162, which are shown, differ in various non-human primate sequences. CD40 residues Ala115 and Ser126 are on the opposite side of the BMS3h-56-5 binding site. Trp109 and Leu121 bind in a cleft that lies between CDR3 and FR-2 (residues Leu45 and Arg47) of BMS3h-56-5. His162 interacts with residues in CDR2 of BMS3h-56-5, especially Lys 56. In summary, the CD40 epitope comprises one or more residues listed in TABLE 1, with reference to the numbering used in SEQ ID NO: 1.

TABLE 1
CD40 residues contacting BMS3h-56-5:

Trp109, Leu121, His122, Ser124, Ser156,
Ala157, Phe158, Glu159, His162

[0060] BMS3h-56-5, like the other dAbs listed in TABLE 3, was prepared by a screening and affinity maturation method described in more detail below, using human CD40 as the antigen. It is expected that dAbs created by affinity maturation from a common precursor dAb will bind the same human CD40 epitope. Competition studies described below, for example, indicate that dAbs generated from a common precursor dAb by affinity maturation compete for binding with each other to human CD40. The same competition studies, however, show that the dAbs do not compete with at least the Chi220 or G28-5 antibodies.

[0061] 3. Antibody Polypeptides

[0062] The antibody polypeptides comprise a variable domain. In one embodiment, the antibody polypeptides are in the form of a dAb that contains a single variable domain. Antibody polypeptides may be full-length anti-CD40 immunoglobulin molecules comprising two heavy (H) chains and two light (L) chains interconnected by disulfide bonds. In this embodiment, the amino terminal portion of each chain includes a variable domain (V_{L} or V_{H}) of about 100-110 amino acids primarily responsible for antigen recognition via the complementarity determining regions (CDRs) contained therein. The carboxy-terminal “half” of each heavy chain defines a constant region (Fe) primarily responsible for effector function.

[0063] Antibody polypeptides also may be “fragments” comprising a portion of the full-length anti-CD40 immunoglobulin molecule that comprises a variable domain that specifically binds CD40. Thus, the term “antibody polypeptides” includes an antigen-binding heavy chain, light chain, heavy chain-light chain dimer, Fab fragment, F(ab′)₂ fragment, Fv fragment, single chain Fv (scFv), and dAb, for example. The term “antibody polypeptides” thus includes polypeptides made by recombinant engineering and expression, as well as monoclonal antibodies produced by natural recombination and secretion by hybridoma cell clones.

[0064] Light chains are classified as kappa (κ) or lambda (λ), and are characterized by a particular constant region, C_{L}, as known in the art. Heavy chains are classified as γ, μ, α, δ, or ε, and define the isotype of an antibody as IgG, IgM, IgA, IgD, or IgE, respectively. The heavy chain constant region is comprised of three domains (CH1, CH2, and CH3) for IgG, IgD, and IgA; and four domains (CH1, CH2, CH3, and CH4) for IgM and IgE. Anti-CD40 antibodies may have a heavy chain constant region selected from any of the immunoglobulin classes (IgA, IgD, IgG, IgM, and IgE).

[0065] Each light chain variable domain (V_{L}) and heavy chain variable domain (V_{H}) is composed of three CDRs and four framework regions (FRs), arranged from amino-terminus to carboxy-terminus in the following order: FR1, CDR1, FR2, CDR2, FR3, CDR3, FR4. The three CDRs of the light chain are referred to as “LCDR1, LCDR2, and LCDR3” and the three CDRs of the heavy chain are referred to as “HCDR1, HCDR2, and HCDR3.”

[0066] As used herein, the term “Fc domain” refers to the constant region antibody sequences comprising CH2 and CH3 constant domains as delimited according to Kabat et al., Sequences of Immunological Interest, 5^{th} ed., U.S. Dept. Health & Human Services, Washington, D.C. (1991). The Fc region may be derived from an IgG1 or an IgG4 Fc region, for example. A variable domain may be fused to an Fc domain. In this case, the carboxyl terminus of the variable domain (either a V_{L} or V_{H} domain, including dAbs) may be linked or fused to the amino terminus of the Fc CH2 domain. Alternatively, the carboxyl terminus of the variable domain may be linked or fused to the amino terminus of a CH1 domain, which itself is fused to the Fc CH2 domain. The protein may comprise the hinge region between the CH1 and CH2 domains in whole or in part.

[0067] The CDRs contain most of the residues that form specific interactions with the antigen. As shown in FIG. 2, for example, CDR2 and CDR3, plus FR4 residue Trp103, form most of the contacts between CD40 and the dAb BMS3h-56-5. For example, the variable domain of an antibody polypeptide comprises CDR1, CDR2, and CDR3 regions that have the same amino acid sequence as the CDR1, CDR2, and CDR3 regions of one of the dAbs listed in TABLE 3 or that each differ from the CDR1, CDR2, and CDR3 regions by one or two amino acids. For example, the antibody polypeptide may comprise CDR1, CDR2, and CDR3 regions that have the same amino acid sequence as the CDR1, CDR2, and CDR3 regions of BMS3h-56-5, BMS3h-56-258, or BMS3h-56-201, for example.

[0068] A “domain antibody” (dAb) comprises a single variable (V_{L} or V_{H}) domain that is capable of specifically and monovalently binding an antigen, such as CD40. For example, a dAb may have a V_{HH} structure, characteristic of a camelid dAb. A “V_{H} domain” as used herein is meant to include a V_{HH} structure. In another embodiment, the V_{H} domains of the present invention (including all features and combination of features presented as embodiments herein) are other than V_{HH} domains. dAbs may form homo- or heterodimers in solution. Bivalent anti-CD40 antibodies are believed to exhibit agonist activity because of the ability to cross-link bound CD40 molecules on the cell surface. While not limited by any particular theory, it is believed that monovalent dAbs do not activate CD40, because the dAbs do not cross-link CD40.

[0069] As used herein, the term “variable domain” refers to immunoglobulin variable domains defined by Kabat et al., Sequences of Immunological Interest, 5^{th} ed., U.S. Dept. Health & Human Services, Washington, D.C. (1991). The numbering and positioning of CDR amino acid residues within the variable domains is in accordance with the well-known Kabat numbering convention. For example, the Kabat numbering for BMS3h-56-5 (SEQ ID NO: 321) is compared in TABLE 2 to the same sequence numbered sequentially. In the Kabat numbering, BMS3h-56-5 has insertion residues 52A, 82A, 82B, 82C, and is missing residue 100. In both numbering systems, the Ser and Thr at the N-terminus that are part of the expression construct are given negative numbers.

TABLE 2

[chemical structure]

[0070] The term “human,” when applied to antibody polypeptides, means that the antibody polypeptide has a sequence, e.g., FR and/or CH domains, derived from a human immunoglobulin. A sequence is “derived from” a human immunoglobulin coding sequence when the sequence is either: (a) isolated from a human individual or from a cell or cell line from a human individual; (b) isolated from a library of cloned human antibody gene sequences or of human antibody variable domain sequences; or (c) diversified by mutation and selection from one or more of the polypeptides above. An “isolated” compound as used herein means that the compound is removed from at least one component with which the compound is naturally associated with in nature.

[0071] Antibody polypeptides can be administered to human patients while largely avoiding the anti-antibody immune response often provoked by the administration of antibodies from other species, e.g., mouse. For example, murine antibodies can be “humanized” by grafting murine CDRs onto a human variable domain FR, according to procedures well known in the art. Human antibodies as disclosed herein, however, can be produced without the need for genetic manipulation of a murine antibody sequence.

[0072] Variable domains may comprise one or more framework regions (FR) with the same amino acid sequence as a corresponding framework region encoded by a human germline antibody gene segment. For example, a domain antibody may comprise the V_{H} germline gene segments DP47, DP45, or DP38, the V_{κ} germline gene segment DPK9, the J_{H} segment JH4b, or the J_{κ} segment J_{κ}1.

[0073] Changes may be made to antibody polypeptide sequences while retaining the ability to bind CD40 specifically. Specifically, the antibody polypeptides (e.g., a dAb) may comprise a variant variable domain that retains the function of specifically binding the same CD40 epitope as the dAb BMS3h-56-5. See TABLE 1. That is, the variant variable domain may bind a human CD40 epitope comprising at least one of Trp109, Leu121, His122, Ser124, Ser156, Ala157, Phe158, Glu159, and His162 of SEQ ID NO: 1. In one embodiment, the variant variable domain epitope may comprise Trp109, Leu121, His122, Ser124, Ser156, Ala157, Phe158, Glu159, and His162. Alternatively, the variant variable domain may specifically bind a CD40 epitope comprising CD40 residue Trp109. In yet another embodiment, the variant variable domain may compete with BMS3h-56-5 for specific binding to CD40. Error-prone affinity maturation, as disclosed in the examples below, provides one exemplary method for making and identifying antibody polypeptides with variant sequences that specifically bind the same CD40 epitope.

[0074] For example, a variant variable domain may differ from one of the variable domains listed in TABLE 3 by up to 10 amino acids or any integral value between, where the variant variable domain specifically binds CD40. Alternatively, the variant variable domain may have at least 90% sequence identity (e.g., at least 92%, 95%, or 98% sequence identity) relative to a sequence listed in the present Sequence Listing. Non-identical amino acid residues or amino acids that differ between two sequences may represent amino acid substitutions, additions, or deletions. Residues that differ between two sequences appear as non-identical positions, when the two sequences are aligned by any appropriate amino acid sequence alignment algorithm, such as BLAST.

[0075] It is provided that amino acid substitutions may be made to individual FR regions, such that one or more FR comprises up to two amino acid differences relative to the amino acid sequence of the corresponding FR encoded by a human germline antibody gene segment. It is further provided that the variant variable domain may contain one or two amino acid substitutions in one or more CDR. Representative variable domains that specifically bind CD40 are listed in TABLE 3.

[0076] ClustalW2 alignments between representative variable domains of antibody polypeptides from lineages BMS3h-56, BMS3h-37, BMS3h-38, and BMS3h-198 are shown in FIG. 4, FIG. 5, FIG. 6, and FIG. 7, respectively. As a general rule, the degree to which an amino acid is conserved in an alignment of related protein sequences is proportional to the relative importance of the amino acid position to the function of the protein. That is, amino acids that are common in all related sequences likely play an important role and cannot be easily substituted. On the other hand, positions that vary between the sequences likely can be substituted with other amino acids or otherwise modified, while maintaining the activity of the protein. The alignments shown in FIG. 4, FIG. 5, FIG. 6, and FIG. 7 and the structural relationships ascertained from FIG. 1 and FIG. 2, for example, can guide the construction of variant antibody polypeptides that specifically bind an epitope of human CD40 comprising the amino acid sequence of SEQ ID NO: 1, wherein the antibody polypeptide competes with the binding of dAb BMS3h-56-201 (SEQ ID NO: 9). Such variant antibody polypeptides include, but are not limited to, those with an amino acid modification corresponding to a substitution, insertion, or deletion with reference to any of the variable domains listed in TABLE 3. Variant antibody polypeptides also include those with an amino acid modification corresponding to an amino acid modification conserved between the sequences listed in TABLE 3.

[0077] The information regarding the boundaries of the V_{L} or V_{H} domains of heavy and light chain genes may be used to design PCR primers to amplify the variable domain from a cloned heavy or light chain coding sequence encoding an antibody polypeptide known to bind CD40. The amplified variable domain may be inserted into a suitable expression vector, e.g., pHEN-1 (Hoogenboom et al. (1991) Nucleic Acids Res. 19:4133-4137) and expressed, either alone or as a fusion with another polypeptide sequence, using techniques well known in the art. Based on the disclosed amino acid and polynucleotide sequences, the fusion protein can be produced and purified using only ordinary skill in any suitable mammalian host cell line, such as CHO, 293, COS, NSO, and the like, followed by purification using one or a combination of methods, including protein A affinity chromatography, ion exchange, reverse phase techniques, or the like.

[0078] In one aspect, the antibody polypeptide is a “dual specific” antibody polypeptide comprising a first variable domain that specifically binds human CD40 comprising the amino acid sequence of SEQ ID NO: 1. Dual specific antibody polypeptides comprise a second variable domain that specifically binds a second antigen that is other than human CD40.

[0079] In another embodiment, the second antigen may be a cell surface molecule of an immune effector cell or a soluble molecule such as a cytokine, for example. Binding of the dual specificity antibody polypeptide could be used to antagonize CD40 and antagonize a biological activity of the second antigen. Cell surface molecules of immune effector cells include the cluster of differentiation (CD) molecules. Representative CD markers are listed on the Internet at hypertext transfer protocol en.wikipedia.org/wiki/List_of_human_clusters_of_differentiation (last modified on Feb. 22, 2012). Cell surface molecules of immune effector cells also include Major Histocompatibility Complex (MHC) Class II molecules. Antibodies against these cell surface molecules are known in the art and can be used a source of a variable domain to construct a dual specific antibody polypeptide.

[0080] In one embodiment, antibody polypeptides of a dual specific ligand may be linked by an “amino acid linker” or “linker.” For example, a dAb may be fused to the N-terminus of an amino acid linker, and another dAb may be fused to the C-terminus of the linker. Although amino acid linkers can be any length and consist of any combination of amino acids, the linker length may be relatively short (e.g., five or fewer amino acids) to reduce interactions between the linked domains. The amino acid composition of the linker also may be adjusted to reduce the number of amino acids with bulky side chains or amino acids likely to introduce secondary structure. Suitable amino acid linkers include, but are not limited to, those up to 3, 4, 5, 6, 7, 10, 15, 20, or 25 amino acids in length. Representative amino acid linker sequences include (GGGGS)ₙ (SEQ ID NO: 4), where n may be any integer between 1 and 5. Other suitable linker sequences may be selected from the group consisting of AST (SEQ ID NO: 5), TVAAPS (SEQ ID NO: 6), TVA (SEQ ID NO: 7), and ASTSGPS (SEQ ID NO: 8).

[0081] The binding of the second antigen can increase the in vivo half-life of the antibody polypeptide. For example, the second variable domain of the dual specific antibody polypeptide may specifically bind serum albumin (SA), e.g., human serum albumin (HSA). The antibody polypeptide formatted to bind HSA can have an increased in vivo t-α (“alpha half-life”) or t-β (“beta half-life”) half-life relative to the same unformatted antibody polypeptide. The t-α and t-β half-lives measure how quickly a substance is distributed in and eliminated from the body. The linkage to HSA may be accomplished by fusion of the antibody polypeptide with a second variable domain capable of specifically binding HSA, for example. Anti-human serum albumin antibodies are well-known in the art. See, e.g., Abeam®, Human Serum Albumin antibodies ab10241, ab2406, and ab8940, available on the Internet at hypertext transfer protocol www.abcam.com/index.html, or GenWay, ALB antibody, available on the Internet at hypertext transfer protocol www.genwaybio.com. Variable domains that specifically bind HSA can be obtained from any of these antibodies, and then fused to an antibody polypeptide of the disclosure using recombinant techniques that are well known in the art.

[0082] Alternatively, the linking of the antibody polypeptide to HSA can be accomplished by directly fusing the antibody polypeptide sequence to an HSA coding sequence using techniques well known to the skilled artisan. The HSA coding sequences can be obtained by PCR using primers derived from the cDNA sequence available at GenBank Accession No. NM000477, for example.

[0083] In one embodiment, the tα-half-life of the HSA-linked domain antibody composition is increased by 10% or more. In another embodiment, the tα-half-life of the HSA-linked domain antibody composition is in the range of 0.25 hours to 6 hours. In another embodiment, the tβ-half-life of the HSA-linked domain antibody composition is increased by 10% or more. In another embodiment, the tβ-half-life of the HSA-linked domain antibody composition is in the range of 12 to 48 hours.

[0084] In another embodiment, an antibody polypeptide may be formatted to increase its in vivo half-life by PEGylation. In one embodiment, the PEG is covalently linked. In another embodiment, the PEG is linked to the antibody polypeptide at a cysteine or lysine residue. In yet another embodiment, the PEG-linked antibody polypeptide has a hydrodynamic size of at least 24 kD. In yet another embodiment, the total PEG size is from 20 to 60 kD, inclusive. In yet another embodiment, the PEG-linked domain antibody has a hydrodynamic size of at least 200 kD.

[0085] PEGylation can be achieved using several PEG attachment moieties including, but not limited to N-hydroxylsuccinimide active ester, succinimidyl propionate, maleimide, vinyl sulfone, or thiol. A PEG polymer can be linked to an antibody polypeptide at either a predetermined position, or can be randomly linked to the domain antibody molecule. PEGylation can also be mediated through a peptide linker attached to a domain antibody. That is, the PEG moiety can be attached to a peptide linker fused to an antibody polypeptide, where the linker provides the site (e.g., a free cysteine or lysine) for PEG attachment. Methods of PEGylating antibodies are well known in the art, as disclosed in Chapman, et al., “PEGylated antibodies and antibody fragments for improved therapy: a review,” Adv. Drug Deliv. Rev. 54(4):531-45 (2002), for example.

[0086] Antibody polypeptides also may be designed to form a dimer, trimer, tetramer, or other multimer. Antibody polypeptides, e.g., dAbs, can be linked to form a multimer by several methods known in the art, including, but not limited to, expression of monomers as a fusion protein, linkage of two or more monomers via a peptide linker between monomers, or by chemically joining monomers after translation, either to each other directly, or through a linker by disulfide bonds, or by linkage to a di-, tri- or multivalent linking moiety (e.g., a multi-arm PEG). In one embodiment, the multimer can bind a single molecule of CD40.

[0087] 4. Pharmaceutical Compositions and Methods of Treatment

[0088] A pharmaceutical composition comprises a therapeutically-effective amount of one or more antibody polypeptides and optionally a pharmaceutically acceptable carrier. Pharmaceutically acceptable carriers include, for example, water, saline, phosphate buffered saline, dextrose, glycerol, ethanol and the like, as well as combinations thereof. Pharmaceutically acceptable carriers can further comprise minor amounts of auxiliary substances, such as wetting or emulsifying agents, preservatives, or buffers that enhance the shelf-life or effectiveness of the fusion protein. The compositions can be formulated to provide quick, sustained, or delayed release of the active ingredient(s) after administration. Suitable pharmaceutical compositions and processes for preparing them are well known in the art. See, e.g., Remington, THE SCIENCE AND PRACTICE OF PHARMACY, A. Gennaro, et al., eds., 21st ed., Mack Publishing Co. (2005).

[0089] The pharmaceutical composition further may comprise an immuno-suppressive/immunomodulatory and/or anti-inflammatory agent. A method of treating an immune disease in a patient in need of such treatment may comprise administering to the patient a therapeutically effective amount of the pharmaceutical composition. Antagonizing CD40-mediated T cell activation could inhibit undesired T cell responses occurring during autoimmunity, transplant rejection, or allergic responses, for example. Inhibiting CD40-mediated T cell activation could moderate the progression and/or severity of these diseases.

[0090] As used herein, a “patient” means an animal, e.g. mammal, including humans. The patient may be diagnosed with an immune disease. “Treatment” or “treat” or “treating” refers to the process involving alleviating the progression or severity of a symptom, disorder, condition, or disease. An “immune disease” refers to any disease associated with the development of an immune reaction in an individual, including a cellular and/or a humoral immune reaction. Examples of immune diseases include, but are not limited to, inflammation, allergy, autoimmune disease, or graft-related disease. The autoimmune disease may be selected from the group consisting of systemic lupus erythematosus, multiple sclerosis, rheumatoid arthritis, diabetes, psoriasis, scleroderma, atherosclerosis, inflammatory bowel disease, and ulcerative colitis.

[0091] Diseases that can be treated by administering the pharmaceutical composition may be selected from the group consisting of Addison's disease, allergies, ankylosing spondylitis, asthma, atherosclerosis, autoimmune diseases of the ear, autoimmune diseases of the eye, autoimmune hepatitis, autoimmune parotitis, colitis, coronary heart disease, Crohn's disease, diabetes, including Type 1 and/or Type 2 diabetes, epididymitis, glomerulonephritis, Graves' disease, Guillain-Barre syndrome, Hashimoto's disease, hemolytic anemia, idiopathic thrombocytopenic purpura, inflammatory bowel disease, immune response to recombinant drug products (e.g., Factor VII in hemophiliacs), systemic lupus erythematosus, male infertility, multiple sclerosis, myasthenia gravis, pemphigus, psoriasis, rheumatic fever, rheumatoid arthritis, sarcoidosis, scleroderma, Sjogren's syndrome, spondyloarthropathies, thyroiditis, transplant rejection, and vasculitis. Autoimmune-mediated conditions include, but are not limited to, conditions in which the tissue affected is the primary target, and in some cases, the secondary target. Such conditions include, but are not limited to, AIDS, atopic allergy, bronchial asthma, eczema, leprosy, schizophrenia, inherited depression, transplantation of tissues and organs, chronic fatigue syndrome, Alzheimer's disease, Parkinson's disease, myocardial infarction, stroke, autism, epilepsy, Arthus' phenomenon, anaphylaxis, alcohol addiction, and drug addiction.

[0092] The pharmaceutical composition may be administered alone or in combination therapy, (i.e., simultaneously or sequentially) with an immunosuppressive/immunomodulatory and/or anti-inflammatory agent. Different immune diseases can require use of specific auxiliary compounds useful for treating immune diseases, which can be determined on a patient-to-patient basis. For example, the pharmaceutical composition may be administered in combination with one or more suitable adjuvants, e.g., cytokines (IL-10 and IL-13, for example) or other immune stimulators, e.g., chemokines, tumor-associated antigens, and peptides. Suitable adjuvants are known in the art.

[0093] Any suitable method or route can be used to administer the antibody polypeptide or the pharmaceutical composition. Routes of administration include, for example, oral, intravenous, intraperitoneal, subcutaneous, or intramuscular administration. A therapeutically effective dose of administered antibody polypeptide(s) depends on numerous factors, including, for example, the type and severity of the immune disease being treated, the use of combination therapy, the route of administration of the antibody polypeptide(s) or pharmaceutical composition, and the weight of the patient. A non-limiting range for a therapeutically effective amount of a domain antibody is 0.1-20 mg/kg, and in an aspect, 1-10 mg/kg, relative to the body weight of the patient. The dose of antibody polypeptide(s) can be further guided by the amount of antibody polypeptide(s) required for CD40 antagonism in in vitro and/or in vivo models of disease states. Representative models are described below and in the examples.

[0094] 5. In Vitro and In Vivo Models

[0095] The ability of antibody polypeptides of the disclosure to antagonize CD40 can be tested in one of several available in vitro or in vivo model systems. Appropriate animal and cell model systems are described below. Further cell assay systems are described in the examples.

[0096] 5.1. Inflammatory Bowel Disease (IBD) Models:

[0097] IBD is a multifactorial immune disorder of uncertain etiology. Several mouse models of mucosal inflammation that resemble IBD have provided insight into the mechanisms governing both normal and pathological mucosal immune function. IBD models include using the mucosal immunity and inflammation system of De Winter et al., Am. J. Physiol. 276: G1317-1321 (1999). In one aspect, the injection into immunodeficient mice of a subset of CD4(+) T lymphocytes, the CD4(+)CD45RBhigh cells, leads to inflammation of the intestine. Pathogenesis is due in part to the secretion of proinflammatory cytokines. The induction of colitis can be prevented by co-transfer of another CD4(+) subpopulation, the CD4(+)CD45RBlow T cells. This population behaves analogously to the CD4(+)CD45RBhigh population in terms of the acquisition of activation markers and homing to the host intestine. However, their lymphokine profile when activated is different, and anti-inflammatory cytokines secreted and/or induced by CD4(+)CD45RBlow T cells prevent colitis. De Winter et al. provide a description of the adoptive transfer model and the factors that promote and prevent colitis pathogenesis.

[0098] 5.2. Spontaneous Arthritis Models:

[0099] A model of organ-specific disease provoked by systemic autoimmunity is provided by Kouskoff et al., Cell 87: 811-822 (1996). Rheumatoid arthritis (RA) is a chronic joint disease characterized by leukocyte invasion and synoviocyte activation followed by cartilage and bone destruction. Kouskoff et al. disclose a spontaneous mouse model of RA, generated by crossing a T cell receptor (TCR) transgenic line with the NOD strain. All offspring develop a joint disease highly reminiscent of RA in man. The trigger for the murine disorder is chance recognition of a NOD-derived major histocompatibility complex (MHC) class II molecule by the transgenic TCR; progression to arthritis involves CD4+ T, B, and probably myeloid cells.

[0100] 5.3. Collagen Induced Arthritis (CIA) Model:

[0101] A mouse model of collagen-induced arthritis is provided by Brand et al., Methods Mol. Med. 102: 295-312 (2004). Collagen-induced arthritis (CIA) is an autoimmune disease that can be elicited in susceptible strains of rodents (rat and mouse) and non-human primates by immunization with type II collagen (CII), the major constituent protein of articular cartilage. After immunization, the animals develop an autoimmune polyarthritis that shares several clinical and histological features with RA. Susceptibility to CIA in rodents is linked to the class II molecules of the major histocompatibility complex (MHC), and the immune response to CII is characterized by both the stimulation of collagen-specific T cells and the production of high titers of antibody specific for both the immunogen (heterologous CII) and the autoantigen (mouse CII). Histologically, murine CIA is characterized by an intense synovitis that corresponds with the clinical onset of arthritis. This experimental data is useful evaluating CIA because of the pathological similarities between CIA and RA.

[0102] 5.4. Antigen Induced T Cell Proliferation In Vivo Model:

[0103] The use of adoptive transfer of T cell receptor (TCR)-transgenic T cells provides an in vivo model for antigen-induced T-cell proliferation. Pape et al., Immunol. Rev. 156: 67-78 (1997) discloses adoptive transfer of TCR-transgenic T cells uniformly expressing an identifiable TCR of a known peptide/MHC specificity. The model can be used to monitor the in vivo behavior of antigen-specific T cells. Naive T cells are initially activated within T-cell zones of secondary lymphoid tissue to proliferate in a B7-dependent manner. If adjuvants or inflammatory cytokines are present during this period, enhanced numbers of T cells accumulate, migrate into B-cell-rich follicles, and acquire the capacity to produce IFN-γ and help B cells produce IgG2a. If inflammation is effectively antagonized, most of the initially activated antigen-specific T cells disappear without entering the follicles, and the survivors are poor producers of IL-2 and IFN-γ.

### EXAMPLES

[0104] TABLE 3 lists representative anti-human CD40 variable domain amino acid sequences useful for the antibody polypeptides of the disclosure. TABLE 4 discloses representative nucleic acids that encode the variable domain sequences listed in TABLE 3. As is well known in the art, multiple codons can encode the same amino acid. Nucleic acids encoding a protein sequence thus include nucleic acids having codon degeneracy. The antibody polypeptides disclosed in TABLE 3 specifically bind CD40 and were made using the reiterative initial/primary screening and affinity maturation methodologies described in the examples that follow.

TABLE 3
Anti-Human CD40 Variable Domain Amino Acid Sequences

BMS3h-56-201
EVQLLESGGGLVQPGGSLRLSCAASGFTFRDYEMWWVRQAPGKGLERVSAINPQGTRTYYADSVKGRFTISRDNSKNTL
YLQMNSLRAEDTAVYYCAKLPFYFQEWGQGTLVTVSS (SEQ ID NO: 9)
BMS3h-56-258
EVQLLESGGGLVQPGGSLRLSCAASGFTFRDYEMWWVRQAPGKGLERVSAINPQGTRTYYADSVKGRFTISRDNSKNTL
YLQMNSLRAEDTAVYYCAKLPFYFHEWGQGTLVTVSS (SEQ ID NO: 10)
BMS3h-37
EVQLLESGGGLVQPGGSLRLSCAASGFTFEWYEMQWVRQAPGKGLEWVSAISGDGYRTYYADSVKGRFTISRDNSKNTL
YLQMNSLRAEDTAVYYCAKELGYFDYWGQGTLVTVSS (SEQ ID NO: 11)
BMS3h-38
EVQLLESGGGLVQPGGSLRLSCAASGFTFEEEEMIWVRQAPGKGLEWVSAISGSGGSTYYADSVKGRFTISRDNSKNTL
YLQMNSLRAEDTAVYYCAKEPFRFDYWGQGTLVTVSS (SEQ ID NO: 12)
BMS3h-41
EVQLLESGGGLVQPGGSLRLSCAASGFTFTEYEMIWVRQAPGKGLEWVSSISGNGANTYYADSVKGRFTISRDNSKNTL
YLQMNSLRAEDTAVYYCAKEPLRFDYWGQGTLVTVSS (SEQ ID NO: 13)
BMS3h-43
EVQLLESGGGLVQPGGSLRLSCTASGFTFNMYEMSWVRQAPGKGLEWVSGISRRGFTTYYADSVKGRFTISRDNSKNTL
YLQMNSLRAEDTAVYYCAKEPITYAMRYARFDYWGQGTLVTVSS (SEQ ID NO: 14)
BMS3h-56
EVQLLESGGGLVQPGGSLRLSCAASGFTFRDYEMWWVRQAPGKGLERVSAINPQGTRTYYADSVKGRFTISRDNSKNTL
YLQMNSLRAEDTAVYYCAKLPFIFDYWGQGTLVTVSS (SEQ ID NO: 15)
BMS3h-106
EVQLLESGGGLVQPGGSLRLSCAASGFTFSTYHMQWVRQAPGKGLEWVSMIDADGLGTYYADSVKGRFTISRDNSKNTL
YLQMNSLRAEDTAVYYCAKPGPQFGQFDYWGQGTLVTVSS (SEQ ID NO: 16)
BMS3h-107
EVQLLESGGGLVQPGGSLRLSCAASGFTFSGYDMQWVRQAPGKGLEWVSTISASGVFTYYADSVKGRFTTSRDNSKNTL
YLQMNSLRAEDTAVYYCAKYPNRFALNNFDYWGQGTLVTVSS (SEQ ID NO: 17)
BMS3h-131
DIQMTQSPSSLSASVGDRVTITCRANSSILWALAWYQQKPGKAPKLLIESSSGLQSGVPSRFSGSGSGTDFTLTISSLQ
PEDFATYYCVQNAGWPGTFGQGTKVEIKR (SEQ ID NO: 18)
BMS3h-193
DIQMTQSPSSLSASVGDRVTITCRASQTIERRLNWYQQKPGKAPKLLIYLASRLQSGVPSRFSGSGSGTDFTLTISSLQ
PEDFATYYCHQYASPPLTFGQGTKVEIKR (SEQ ID NO: 19)
BMS3h-198
EVQLLESGGGLVQPGGSLRLSCAASGFTFAGYEMWWVRQAPGKGLERVSAISGSGGSTYYADSVKGRFTISRDDSKNTL
YLQMNSLRAEDTAVYYCAKDPYSFDYWGQGTLVTVSS (SEQ ID NO: 20)
BMS3h-202
EVQLLESGGGLVQPGGSLRLSCAASGFTFPTAEMVWVRQAPGKGLEWVSSISASGGSTYYADSVKGRFTISRDNSKNTL
YLQMNSLRAEDTAVYYCAKEPVSYVATFDYWGQGTLVTVSS (SEQ ID NO: 21)
BMS3h-217
DIQMTQSPSSLSASVGDRVTITCRASHFIGTLLSWYQQKPGKAPKLLITYGSLLQSGVPSRFSGSGSGTDFTLTISSLQ
PEDFATYYCGQGVLWPATFGQGTKVEIKR (SEQ ID NO: 22)
BMS3h-1
EVQLLESGGGLVQPGGSLRLSCAASGFTFPKNEMTWVRQAPGKGLEWVSAIESDGQATYYADSVKGRFTISRDNSKNTL
YLQMNSLRAEDTAVYYCAKNRIPDLVFDYWGQGTLVTVSS (SEQ ID NO: 23)
BMS3h-2
EVQLLESGGGLVQPGGSLRLSCAASGFTFDAGAMTWVRQAPGKGLEWVSSIDKEGLSTYYADSVKGRFTISRDNSKNTL
YLQMNSLRAEDTAVYYCAKGRIPGLVFDYWGQGTLVTVSS (SEQ ID NO: 24)
BMS3h-3
EVQLLESGGGLVQPGGSLRLSCAASGFTFGDAAMTWVRQAPGKGLEWVSAIQPMGDGTYYADSVKGRFTVSRDNSKNTL
YLQMNSLRAEDTAVYYCAKGRIPTLQFDYWGQGTLVTVSS (SEQ ID NO: 25)
BMS3h-4
EVQLLESGGGLVQPGGSLRLSCAASGFTFEDSPMTWVRQAPGKGLEWVSAITSNGYETYYADSVKGRFTISRDNSKNTL
YLQMNSLRAEDTAVYYCAKGRIPTLHFDYWGQGTLVTVSS (SEQ ID NO: 26)
BMS3h-5
EVQLLESGGGLVQPGGSLRLSCAASGFTFDEHDMSWVRQAPGKGLEWVSRIGPDGFHTYYADSVKGRFTISRDNSKNTL
YLQMNSLRAEDTAVYYCAKGRIPTLHFDYWGQGTLVTVSS (SEQ ID NO: 27)
BMS3h-6
EVQLLESGGGLVQPGGSLRLSCAASGFTFGEYHMSWVRQAPGKGLEWVSRITPLGTLTYYADSVKGRFTISRDNSKNTL
YLQMNSLRAEDTAVYYCAKGRIPSLTFDYWGQGTLVTVSS (SEQ ID NO: 28)
BMS3h-7
EVQLLESGGGLVQPGGSLRLSCAASGFTFGTNAMSWVRQAPGKGLEWVSRISPGGDYTYYADSVKGRFTISRDNSKNTL
YLQMNSLRAEDTAVYYCAKGRVPDLLFDYWGQGTLVTVSS (SEQ ID NO: 29)
BMS3h-8
EVQLLESGGGLVQPGGSLRLSCAASGFTFPSEEMSWVRQAPGKGLEWVSRISADGANTYYADSVKGRFTISRDNSKNTL
YLQMNSLRAEDAAVYYCAKGRVPDLLFDYWGQGTLVTVSS (SEQ ID NO: 30)
BMS3h-9
EVQLLESGGGLVQPGGSLRLSCAASGFTFAEDDMTWVRQAPGKGLEWVSRIAVDGDRTYYADSVKGRFTISRDNSKNTL
YLQMNSLRAEDTAVYYCAKGKVPSLHFDYWGQGTLVTVSS (SEQ ID NO: 31)
BMS3h-10
EVQLLESGGGLVQPGGSLRLSCAASGFTFRTMDMSWVRQAPGKGLEWVSRITGDGMNTYYADSVKGRFTISRDNSKNTL
YLQMNSLRAGDTAVYYCAKGVTPDLTFDYWGQGTLVTVSS (SEQ ID NO: 32)
BMS3h-11
EVQLLESGGGLVQPGGSLRLSCAASGFTFERDDMTWVRQAPGKGLEWVSRINAGGVHTYYADSVKGRFTISRDNSKNTL
YLQMNSLRAEDTAVYYCAKGVTPDLTFDYWGQGTLVTVSS (SEQ ID NO: 33)
BMS3h-12
EVQLLESGGGLVQPGGSLRLSCAASGFTFDDDSMTWVRQAPGKGLEWVSRISSDGASTYYADSVKGRFTISRDNSKNTL
YLQMNSLRAEDTAVYYCAKGVTPDLTFDYWGQGTLVTVSS (SEQ ID NO: 34)
BMS3h-13
EVQLLESGGGLVQPGGSLRLSCAASGFTFTEEDMTWVRQAPGKGLEWVSRIDSVGEGTYYADSVKGRFTISRDNSKNTL
YLQMNSLRAEDTAVYYCAKGVTPDLTFDYWGQGTLVTVSS (SEQ ID NO: 35)
BMS3h-14
EVQLLESGGGLVQPGGSLRLSCAASGFTFSDSAMSWVRQAPGKGLEWVSRIDNPGQHTYYADSVKGRFTISRDNSKNTL
YLQMNSLRAEDTAVYYCAKGTVPTLEFDYWGQGTLVTVSS (SEQ ID NO: 36)
BMS3h-15
EVQLLESGGGLVQPGGSLRLSCAASGFTFGQHSMTWVRQAPGKGLEWVSRIDGGGYNTYYADSVKGRFTISRDNSKNTL
YLQMNSLRAEDTAVYYCAKGEVPRLHFDYWGQGTLVTVSS (SEQ ID NO: 37)
BMS3h-16
EVQLLESGGGLVQPGGSLRLSCAASGFTFGQEPMTWVRQAPGKGLEWVSRIAYNGGDTYYADSVKGRFTISRDNSKNTL
YLQMNSLRAEDTAVYYCAKGITPNLTFDYWGQGTLVTVSS (SEQ ID NO: 38)
BMS3h-17
EVQLLESGGGLVQPGGSLRLSCAASGFTFENYPMSWVRQAPGKGLEWVSRINATGSITYYADSVKGRFTISRDNSKNTL
YLQMNSLRAEDTAVYYCAKGVIPHLMFDYWGQGTLVTVSS (SEQ ID NO: 39)
BMS3h-18
EVQLLESGGGLVQPGGSLRLSCAASGFTFRDYDMSWVRQAPGKGLEWVSRITGTGNSTYYADSVKGRFTISRDNSKNTL
YLQMNSLRAEDTAVYYCAQGVVPYLAFDYWGQGTLVTVSS (SEQ ID NO: 40)
BMS3h-19
EVQLLESGGGLVQPGGSLRLSCAASGFTFEADAMTWVRQAPGKGLEWVSRINVDGDRTYYADSVKGRFTISRDNSKNTL
YLQMNSLRAEDTAVYYCAKGTVPTLEFDYWGQGTLVTVSS (SEQ ID NO: 41)
BMS3h-21
EVQLLESGGGLVQPGGSLRLSCAASGFTFDRADMTWVRQAPGKGLEWVSRISGEGKCTYYADSVKGRFTISRDNSKNTL
YLQMNSLRAEDTAVYYCAKGMVPNLVFDYWGQGTLVTVSS (SEQ ID NO: 42)
BMS3h-22
EVQLLESGGGLVQPGGSLRLSCAASGFTFHWEPMSWVRQAPGKGLEWVSRINSSGWDTYYADSVKGRFTISRDNSKNTL
YLQMNSLRAEDTAVYYCAKGMVPNLVFDYWGQGTLVTVSS (SEQ ID NO: 43)
BMS3h-24
EVQLLESGGGLVQPGGSLRLSCAASGFTFADEPMTWVRQAPGKGLEWVSRIPPEGAPTYYADSVKGRFTISRDNSKNTL
YLQMNSLRAEDTAVYYCAKGITPNLTFDYWGQGTLVTVSS (SEQ ID NO: 44)
BMS3h-26
EVQLLESGGGLVQPGGSLRLSCAASGFTFHNHDMSWVRQAPGKGLEWVSRISRGGLQTYYADSVKGRFTISRDNSKNTL
YLQMNSLRAEDTAVYYCAKGIVPDLHFDYWGQGTLVTVSS (SEQ ID NO: 45)
BMS3h-27
EVQLLESGGGLVQPGGSLRLSCAASGFTFNEYPMSWVRQAPGKGLEWVSRINGDGANTYYADSVKGRFTISRDNSKNTL
YLQMNSLRAEDTAVYYCAKGIIPAMQFDYWGQGTLVTVSS (SEQ ID NO: 46)
BMS3h-28
EVQLLESGGGLVQPGGSLRLSCAASGFTFGDVPMSWVRQAPGKGLEWVSRIDPYGSNTYYADSVKGRFTISRDNSKNTL
YLQMNSLRAEDTAVYYCAKGIMPSLTFDYWGQGTLVTVSS (SEQ ID NO: 47)
BMS3h-29
EVQLLESGGGLVQPGGSLRLSCAASGFTFADYDMSWVRQAPGKGLEWVSRISALGATTYYADSVKGRFTISRDNSKNTL
YLQMNSLRAEDTAVYYCAKGQLPALEFDYWGQGTLVTVSS (SEQ ID NO: 48)
BMS3h-30
EVQLLESGGGLVQPGGSLRLSCAASGFTFKRYYMTWVRQAPGKDLEWVSGIVPSGNRTYYADSVKGRFTISRDNSKNTL
YLQMNSLRAEDTAVYYCAKGRIPDLHFDYWGQGTLVTVSS (SEQ ID NO: 49)
BMS3h-31
EVQLLESGGGLVQPGGSLRLSCAASGFTFADYDMTWVRQAPGKGLEWVSRISPTGGQTYYADSVKGRFTISRDNSKNTL
YLQMNSLRAEDTAVYYCAKGVIPYLSFSPFDYWGQGTLVTVSS (SEQ ID NO: 50)
BMS3h-32
EVQLLESGGGLVQPGGSLRLSCAASGFTFSKYWMGWARQAPGKGLEWVSSIDSHGAGTYYADSVKGRFTISRDNSKNTL
YLQMNSLRVEDTAVYYCAKGAPKFMTTYTFDYWGQGTLVTVSS (SEQ ID NO: 51)
BMS3h-33
EVQLLESGGGLVQPGGSLRLSCAASGFTFLSYPMHWVRQAPGKGLEWVSSIDSRGSVTYYADSVKGRFTISRDNSKNTL
YLQMNSLRAEDTAVYYCAKGHSWTFDYWGQGTLVTVSS (SEQ ID NO: 52)
BMS3h-34
EVQLLESGGGLVQPGGSLRLSCAASGFTFANSNMTWVRQAPGKGLEWVSRINPDGGSTYYADSVKGRFTISRDNSKNTL
YLQMNSLRAEDTAVYYCAEGRIPTLHFDYWGQGTLVTVSS (SEQ ID NO: 53)
BMS3h-35
EVQLLESGGGLVQPGGSLRLSCAASGFTFGPRRMGWVRQAPGKGLEWVSSIDDIGRRTYYADSVKGRFTISRDNSKNTL
YLQMNSLRAEDTAVYYCAEGAQGVLLFDYWGQGTLVTVSS (SEQ ID NO: 54)
BMS3h-36
EVQLLESGGGLVQPGGSLRLSCAASGFTFEDYRMVWVRQAPGKGLEWVSSISTSGELTYYADSVKGRFTISRDNSKNTL
YLQMNSLRAEDTAVYYCAETAGQFFDYWGQGTLVTVSS (SEQ ID NO: 55)
BMS3h-39
EVQLLESGGGLVQPGGSLRLSCAASGFTFPEYEMVWVRQAPGKGLEWVSAISREGRATYYADSVKGRFTISRDNSKNTL
YLQMNNLRAEDTAVYYCAKEPVRFDYWGQGTLVTVSS (SEQ ID NO: 56)
BMS3h-40
EVQLLESGGGLVQPGGSLRLSCAASGFTFSTYEMLWVRQAPGKGLEWVSSISSSGNYTYYADSVKGRFTISRDNSKNTL
YLQMNSLRAEDTAVYYCAKEPLMFDYWGQGTLVTVSS (SEQ ID NO: 57)
BMS3h-42
EVQLLESGGGLVQPGGSLRLSCAASGFTFDTEEMSWVRQAPGKGLEWVSAISPNGAFTFYADSVKGRFTISRDNSKNTL
YLQMNSLRAEDTAVYYCAKEPILFDYWGQGTLVTVSS (SEQ ID NO: 58)
BMS3h-44
EVQLLESGGGLVQPGGSLRLSCAASGFTFGHYDMVWVRQAPGRGLEWVSTINGAGLNTYYADSVKGRFTISRDNSKNTL
YLQMNSLRAEDTAVYYCAQSASRIFDYWGQGTLVTVSS (SEQ ID NO: 59)
BMS3h-45
EVQLLESGGGLVQPGGSLRLSCAASGFTFRSYEMAWVRQAPGKGLEWVSSISTLGTKTYYADSVKGRFTISRDNSKNTL
YLQMNSLRAEDTAVYYCAQSSTHIFDYWGQGTLVTVSS (SEQ ID NO: 60)
BMS3h-46
EVQLLESGGGLVQPGGSLRLSCAASGFTFIRYEMAWVRQAPGKGLEWVSSISSSGWTTYYADSVKGRFTISRDNSKNTL
YLQMNSLRAEDTAVYYCAKSDAHIFDYWGQGTLVTVSS (SEQ ID NO: 61)
BMS3h-47
EVQLLESGGGLVQPGGSLRLSCAASGFTFYAYEMAWVRQAPGKGLEWVSSISDDGTRTYYADSVKGRFTISRDNSKNTL
YLQMNSLRAEDTAVYYCAKDLGQGFDYWGQGTLVTVSS (SEQ ID NO: 62)
BMS3h-48
EVQLLESGGGLVQPGGSLRLSCAASGFTFADHGMTWVRQAPGKGLEWVSGIGPSGEATYYADSVKGRFTISRDNSKNTL
YLQMNSLRAEDTAVYYCAKDRIPNLVFDYWGQGTLVTVSS (SEQ ID NO: 63)
BMS3h-49
EVQLLESGGGLVQPGGSLRLSCAASGFTFESQDMSWVRQAPGKGLEWVSGISPNGWDTYYADSVKGRFTISRDNSKNTL
YLQMNSLRAEDTAVYYCAKDRSDFDYWGQGTLVTVSS (SEQ ID NO: 64)
BMS3h-50
EVQLLESGGGLVQPGGSLRLSCAASGFTFGDYDMWWVRQAPGKGLEWVSRIRHPGGVTYYADSVKGRFTISRDNSKNTL
YLQMNSLRAEDTAVYYCAKAVPKGFDYWGQGTLVTVSS (SEQ ID NO: 65)
BMS3h-51
EVQLLESGGGLVQPGGSLRLSCAASGFTFRVYWMTWVRQAPGKGLEWVSSIDPQGGMTYYADSVKGRFTISRDNSKNTL
YLQMNSLRAEDTAVYYCAKARIPNLEFDYWGQGTLVTVSS (SEQ ID NO: 66)
BMS3h-52
EVQLLESGGGLVQPGESLRLSCAASGFTFSAYDMTWVRQAPGKGLEWVSRINPTGSYTYYADSVKGRFTISRDNSKNTL
YLQMNSLRAEDTAVYYCAKAKIPNLVFDYWGQGTLVTVSS (SEQ ID NO: 67)
BMS3h-53
EVQLLESGGGLVQPGGSLRLSCAASGFTFADSEMMWVRQAPGKGLEWVSGIAHNGGHTYYADSVKGRFTISRDNSKNTL
YLQMNSLRAEDTAVYYCAKAGHPQQTEAFDYWGQGTLVTVSS (SEQ ID NO: 68)
BMS3h-54
EMQLLESGGGLVQPGGSLRLSCAASGFTFATYDMYWVRQAPGKGLEWVSKISPNGWSTYYADSVKGRFTISRDNSKNTL
YLQMNSLRAEDTAVYYCAKYQTHFDYWGQGTLVTVSS (SEQ ID NO: 69)
BMS3h-55
EVQLLESGGGLVQPGGSLRLSCAASGFTFSVYDMRWVRQAPGKGLEWVSTISSSGTYTYYADSVKGRFTISRDNSKNTL
YLQMNSLRAEDTAVYYCAKYPKNFDYWGQGTLVTVSS (SEQ ID NO: 70)
BMS3h-57
EVQLLESGGGLVQPGGSLRLSCAASGFTFSHEDMTWVRQAPGKGLEWVSSISPNGWDTYYADSVKGRFTISRDNSKNTL
YLQMNSLRAEDTAVYYCAKRTRSKFDYWGQGTLVTVSS (SEQ ID NO: 71)
BMS3h-58
EVQLLESGGGLVQPGGSLRLSCAASGFTFEKYIMGWARQAPGKGLEWVSTIDYWGQHTYYADSVKGRFTISRDNSKNTL
YLQMNSLRAEDTAVYYCAKRSHLIPLQFDYWGQGTLVTVSS (SEQ ID NO: 72)
BMS3h-59
EVQLLESGGGLVQPGGSLRLSCAASGFTFSDYAMGWVRQAPGKGLEWVSTISYVGYYTYYADSVKGRFTISRDNSKNTL
YLQMNSLRAEDTAVYYCAKKALRGEAFTERFDYWGQGTLVTVSS (SEQ ID NO: 73)
BMS3h-60
EVQLLESGGGLVQPGGSLRLSCAASGFTFGPYMMHWVRQAPGKGLEWVSTIEVNGNRTYYADSVKGRFTISRDNSKNTL
YLQMNSLRAEDTAVYYCAKWVGSKTSSDKSFDYWGQGTLVTVSS (SEQ ID NO: 74)
BMS3h-61
EVQLLESGGGLVQPGGSLRLSCAASGFTFGTTEMAWVRQAPGKGLEWVSSIGSAGAWTYYADSVKGRFTISRDNSKNTL
YLQMNSLRAEDTAVYYCAKIGGHPQGQFDYWGQGTLVTVSS (SEQ ID NO: 75)
BMS3h-62
EVQLLESGGGLVQPGGSLRLSCAASGFTFPREWMAWVRQAPGKGLEWVSSIQPMGQTTYYADSVKGRFTISRDNSKNTL
YLQMNSLRAEDTAVYYCAKYSRNKGFFDYWGQGTLVTVSS (SEQ ID NO: 76)
BMS3h-63
EVQLLESGGGLVQPGGSLRLSCAASGFTFTSEYMGWVRQAPGKGLEWVSSIQRYGSTTYYADSVKGRFTISRDNSKNTL
YLQMNSLRAEDTAVYYCAKHESNWETFDYWGQGTLVTVSS (SEQ ID NO: 77)
BMS3h-70
EVQLLESGGGLVQPGGSLRLSCAASGFTFSVYSMQWVRQAPGKGLEWVSAITPNGTRTYYADSVKGRFTISRDNSKNTL
YLQMNSLRAEDTAVYYCAKTLGRGSYPGVDFDYWGQGTLVTVSS (SEQ ID NO: 78)
BMS3h-71
EVQLLESGGGLVQPGGSLRLSCAASGFTFPSYAMTWVRQAPGKGLEWVSRITADGTVTYYADSVKGRFTISRDNSKNTL
YLQMNSLRAEDTAVYYCAKGSIPMLTFDYWGQGTLVTVSS (SEQ ID NO: 79)
BMS3h-72
EVQLLESGGGLVQPGGSLRLSCAASGFTFSTYDMIWVRQAPGKGLEWVSAISPNGTGIYYADSVKGRFTISRDNSKNTL
YLQMNSLRAEDTAVYYCAKNQSVHHAVFDYWGQGTLVTVSS (SEQ ID NO: 80)
BMS3h-73
EVQLLESGGGLVQPGGSLRLSCAASGFTFENYEMTWVRQAPGKGLEWVSRIAPHGRLTYYADSVKGRFTISRDNSKNTL
YLQMNSLRAEDTAVYYCAKGQIPMLDFDYWGQGTLVTVSS (SEQ ID NO: 81)
BMS3h-74
EVQLLESGGGLVQPGGSLRLSCAASGFTFSHYMMMWVRQAPGKGLEWVSTISHFGDITYYADSVKGRFTISRDNSKNTL
YLQMNSLRAEDTAVYYCAKNDMVMKNGGFDYWGQGTLVTVSS (SEQ ID NO: 82)
BMS3h-75
EVQLLESGGGLVQPGGSLRLSCAASGFTFERYDMSWVRQAPGKGLEWVSRIDSRGWSTYYADSVKGRFTISRDNSKNTL
YLQMNSLRAEDTAVYYCAKGLVPHLRFDYWGQGTLVTVSS (SEQ ID NO: 83)
BMS3h-76
EVQLLESGGGLVQPGGSLRLSCAASGFTFANAQMTWVRQAPGKGLEWVSRIDAMGDATYYADSVKGRFTISRDNSKNTL
YLQMNSLRAEDTAVYYCAKGKVPSIDYWGQGTLVTVSS (SEQ ID NO: 84)
BMS3h-77
EVQLLESGGGLVQPGGSLRLSCAASGFTFANAQMTWVRQAPGKGLEWVSRIDAMGDATYYADSVKGRFTISRDNSKNTL
YLQMNSLRAEDTAVYYCAKGVIPAFDYWGQGTLVTVSS (SEQ ID NO: 85)
BMS3h-78
EVQLLESGGGLVQPGGSLRLSCAASGFTFQNDRMHWVRQAPGKGLEWVSSISATGGDTYYADSVKGRFTISRDNSKNTL
YLQMNSLRAEDTAVYYCAKQTGTNRFDYWGQGTLVTVSS (SEQ ID NO: 86)
BMS3h-79
EVQLLESGGGLVQPGGSLRLSCAASGFTFNQPYMSWVRQAPGKGLEWVSSIDASGGTTYYADSVKGRFTISRDNSKNTL
YLQMNSLRAEDAAVYYCAKDRIPNLVFDYWGQGTLVTVSS (SEQ ID NO: 87)
BMS3h-80
EVQLLESGGGLVQPGGSLRLSCAASGFTFDNENMTWVRQAPGKGLEWVSRIDGGGYNTYYADSVKGRFTISRDNSKNTL
YLQMNSLRAEDTAVYYCAKGQVPELLFDYWGQGTLVTVSS (SEQ ID NO: 88)
BMS3h-81
EVQLLESGGGLVQPGGSLRLSCAASGFTFVSSNMTWVRQAPGKGLEWVSAISGSGGSTYYADSVKGRFTISRDNSKNTL
YLQMNSLRAEDTAVYYCAKGRIPTLVFDYWGQGTLVTVSS (SEQ ID NO: 89)
BMS3h-82
EVQLLESGGGLVQPGGSLRLSCAASGFTFVSSNMTWVRQAPGKGLEWVSAISGSGGSTYYADSVKGRFTISRDNSKNTL
YLQMNSLRAEDTAVYYCAKDRIPNLVFDYWGQGTLVTVSS (SEQ ID NO: 90)
BMS3h-83
EVQLLESGGGLVQPGGSLRLSCAASGFTFSDDSMSWVRQAPGKGLEWVSRINDAGSSTYYADSVKGRFTISRDNSKNTL
YLQMNSLRAEDTAVYYCAKGTIPLLEFDYWGQGTLVTVSS (SEQ ID NO: 91)
BMS3h-84
EMQLLESGGGLVQPGGSLRLSCAASGFTFVSDTMSWVRQAPGKGLEWVSRIDGTGGDTYYADSVKGRFTISRDNSKNTL
YLQMNSLRAGDTAVYYCAKGLIPDLQFDYWGQGTLVTVSS (SEQ ID NO: 92)
BMS3h-85
EVQLLESGGGLVQPGGSLRLSCAASGFTFDEEEMTWVRQAPGKGLEWVSRIIGGGHETYYADSVKGRFTISRDNSKNTL
YLQMNSLRAEDTAVYYCAKGTIPLLEFDYWGQGTLVTVSS (SEQ ID NO: 93)
BMS3h-86
EVQLLESGGGLVQPGGSLRLSCAASGFTFDNENMTWVRQAPGKDLEWVSRITERGDVTYYADSVKGRFTISRDNSKNTL
YLQMNSLRAEDTAVYYCAKGTVPTLEFDYWGQGTLVTVSS (SEQ ID NO: 94)
BMS3h-87
EVQLLESGGGLVQPGGSLRLSCAASGFTFDEEEMTWVRQAPGKGLEWVSRIIGGGHETYYADSVKGRFTISRDNSKNTL
YLQMNSLRAEDTAVYYCAKGTVPTLEFDYWGQGTLVTVSS (SEQ ID NO: 95)
BMS3h-88
EVQLLESGGGLVQPGGSLRLSCAASGFTFHETEMTWVRQAPGKGLEWVSAINRLGQDTYYADSVKGRFTISRDNSKNTL
YLQMNSLRAEDTAVYYCAKGRIPGLVFDYWGQGTLVTVSS (SEQ ID NO: 96)
BMS3h-89
EVQLLESGGGLVQPGGSLRLSCAASGFTFSDDSMSWVRQAPGKGLEWVSRINDAGSSTYYADSVKGRFTISRDNSKNTL
YLQMNSLRAEDTAVYYCAKGTVPTLEFDYWGQGTLVTVSS (SEQ ID NO: 97)
BMS3h-90
EVQLLESGGGLVQPGGSLRLSCAASGFTFDNENMTWVRQAPGKDLEWVSRITERGDVTYYADSVKGRFTISRDNSKNTL
YLQMNSLRAEDTAVYYCAKGRIPTLVFDYWGQGTLVTVSS (SEQ ID NO: 98)
BMS3h-91
EVQLLESGGGLVQPGGSLRLSCAASGFTFSDDSMSWVRQAPGKGLEWVSRINDAGSSTYYADSVKGRFTISRDNSKNTL
YLQMNSLRAEDTAVYYCAKGITPNLTFDYWGQGTLVTVSS (SEQ ID NO: 99)
BMS3h-92
EVQLLESGGGLVQPGGSLRLSCAASGFTFADEPMTWVRQAPGKGLEWVSRIPPEGAPTYYADSVKGRFTISRDNSKNTL
YLQMNSLRAEDTAVYYCAKGLIPDLQFDYWGQGTLVTVSS (SEQ ID NO: 100)
BMS3h-93
EVQLLESGGGLVQPGGSLRLSCAASGFTFQDSDMTWVRQAPGKGLEWVSAIAAPGGSTYYADSVKGRFTISRDNSKNTL
YLQMNSLRAEDTAVYYCAKDRIPNLRFDYWGQGTLVTVSS (SEQ ID NO: 101)
BMS3h-94
EVQLLESGGGLVQPGGSLRLSCAASGFTFVSDTMSWVRQAPGKGLEWVSRIDGTGGDTYYADSVKGRFTISRDNSKNTL
YLQMNSLRAEDTAVYYCAKGQVPELLFDYWGQGTLVTVSS (SEQ ID NO: 102)
BMS3h-95
EVQLLESGGGLVQPGGSLRLSCAASGFTFQDSDMTWVRQAPGKGLEWVSAIAAPGGSTYYADSVKGRFTISRDNSKNTL
YLQMNSLRAEDTAVYYCAKDRIPNLVFDYWGQGTLVTVSS (SEQ ID NO: 103)
BMS3h-96
EVQLLESGGGLVQPGGSLRLSCAAAGFTFDLAEMTWVRQAPGKGLEWVSRIDEDGASTYYADSVKGRFTISRDNSKNTL
YLQMNSLRAEDAAVYYCAEGVIPSLTFDYWGQGTLVTVSS (SEQ ID NO: 104)
BMS3h-97
EVQLLESGGGLVQPGGSLRLSCAASGFTFTDKHMSWVRQAPGKGLEWVSRISPDGTYTYYADSVKGRFTISRDNSKNTL
YLQMNSLRAEDAAVYYCAEGVIPSLTFDYWGQGTLVTVSS (SEQ ID NO: 105)
BMS3h-98
EVQLLESGGGLVQPGGSLRLSCAASGFTFAEDDMTWVRQAPGKGLEWVSRIAVDGDRTYYADSVKGRFTISRDNSKNTL
YLQMNSLRTEDTAVYYCAKGKTPHLVFDYWGQGTLVTVSS (SEQ ID NO: 106)
BMS3h-99
EVQLLESGGGLVQPGGSLRLSCAAAGFTFDLAEMTWVRQAPGKGLEWVSRIDEDGASTYYADSVKGRFTISRDNSKNTL
YLQMNSLRAEDTAVYYCAKGQVPALVFDYWGQGTLVTVSS (SEQ ID NO: 107)
BMS3h-100
EVQLLESGGGLVQPGGSLRLSCAASGFTFEDSMMSWVRQAPGKGLEWVSRIDPGGAQTYYADSVKGRFTISRDNSKNTL
YLQMNSLRAEDTAVYYCAKGVTPDLTFDYWGQGTLVTVSS (SEQ ID NO: 108)
BMS3h-101
EVQLLESGGGLVQPGGSLRLSCAASGFTFEHADMSWVRQASGKGLEWVSRIDNSGQSTYYADSVKGRFTISRDNSKNTL
YLQMNSLRAEDTAVYYCAKGVTPDLTFDYWGQGTLVTVSS (SEQ ID NO: 109)
BMS3h-102
EVQLLESGGGLVQPGGSLRLSCAASGFTFSEAEMNWVRQAPGKGLEWVSRITTDGDSTYYADSVKGRFTISRDNSKNTL
YLQMNSLRAEDTAVYYCAKGRIPTLHFDYWGQGTLVTVSS (SEQ ID NO: 110)
BMS3h-103
EVQLLESGGGLVQPGGSLRLSCAASGFTFDDSDMTWVRQAPGKSLEWVSYIRGDDDETYYADSVKGRFTISRDNSKNTL
YLQMNSLRAEDTAVYYCAKNRIPDLVFDYWGQGTLVTVSS (SEQ ID NO: 111)
BMS3h-108
EVQLLESGGGLVQPGGSLRLSCAASGFTFNVADMQWVRQAPGKGLEWVSSISPNGWDTYYADSVKGRFTISRDNSKNTL
YLQMNSLRAEDTAVYYCAKHASTEGPTAFDYWGQGTLVTVSS (SEQ ID NO: 112)
BMS3h-109
EVQLLESGGGLVQPGGSLRLSCAASGFTFGPYDMGWVRQAPGKGLEWVSWISAHGSFTYYADSVKGRFTISRDNSKNTL
YLQMNSLRAEDTAVYYCAKWPYKFDYWGQGTLVTVSS (SEQ ID NO: 113)
BMS3h-110
EVQLLESGGGLVQPGGSLRLSCAASGFTFGSGSMSWVRQAPGKGLEWVSRIGSNGADTYYADSVKGRFTISRDNSKNTL
YLQMNSLRAEDTAVYYCAKGMVPNLVFDYWGQGTLVTVSS (SEQ ID NO: 114)
BMS3h-111
EVQLLESGGGLVQPGGSLRLSCAASGFTFNRFDMTWVRQAPGKGLEWVSAISGSGGSTYYADSVKGRFTISRDNSKNTL
YLQMNSLRAEDTAVYYCAKDRIPNLVFDYWGQGTLVTVSS (SEQ ID NO: 115)
BMS3h-112
EVQLLESGGGLVQPGGSLRLSCAASGFTFGESDMKWVRQAPGKGLEWVSSISPNGWDTYYADSVKGRFTISRDNSKNTL
YLQMNSLRAEDTAVYYCAKSPSSRLKFDYWGQGTLVTVSS (SEQ ID NO: 116)
BMS3h-139
EVQLLESGGGLVQPGGSLRLSCAASGFTFDSSEMSWVRQAPGKGLEWVSSIENQGGATYYADSVKGRFTISRDNSKNTL
YLQMNSLRAEDTAVYYCAKDRIPNLVFDYWGQGTLVTVSS (SEQ ID NO: 117)
BMS3h-140
EVQLLESGGGLVQPGGSLRLSCAASGFTLDAYPMYWVRQAPGKGLEWVSWIASGGGATYYADSVKGRFTISRDNSKNTL
YLQMNSLRAEDTAVYYCAKRTKNFDYWGQGTLVTVSS (SEQ ID NO: 118)
BMS3h-141
EVQLLESGGGLVQPGGSLRLSCAASGFTFMSYSMAWVRQAPGKGLEWVSGITSNGNRTYYADSVKGRFTISRDNSKNTL
YLQMNSLRAEDTAVYYCAKSTGANSRNFDYWGQGTLVTVSS (SEQ ID NO: 119)
BMS3h-142
EVQLLESGGGLVQPGGSLRLSCAASGFTFEGYLMSWVRQAPGKGLEWVSSIAANGMQTYYADSVKGRFTISRDNSKNTL
YLQMNSLRAEDTAVYYCAKKPRGIWDGDFDYWGQGTLVTVSS (SEQ ID NO: 120)
BMS3h-143
EVQLLESGGGLVQPGGSLRLSCAASGFTFHESTMTWVRQAPGKGLEWVSTIRHPGEFTYYADSVKGRFTISRDNSKNTL
YLQMNSLRAGDTAVYYCAKGLIPDLQFDYWGQGTLVTVSS (SEQ ID NO: 121)
BMS3h-144
EVQLLESGGGLVQPGGSLRLSCAASGFTFAMYSMSWVRQAPGKGLEWVSSIAPPGGRTYYADSVKGRFTISRDNSKNTL
YLQMNSLRAEDTAVYYCAKQSLTGYSRSFDYWGQGTLVTVSS (SEQ ID NO: 122)
BMS3h-145
EVQLLESGGGLVQPGGSLRLSCAASGFTFSQNPMSWVRHAPGKGLEWVSTIPANGRPTSYADSVKGRFTISRDNSKNTL
YLQMNSLRAEDTAVYYCAKYSQQPGRRFDYWGQGTLVTVSS (SEQ ID NO: 123)
BMS3h-146
EVQLLESGGGLVQPGGSLRLSCAASGFTFANYHMTWVRQAPGKGLEWVSSIPDSGKQTYYADSVKGRFTISRDNSKNTL
YLQMNSLRAEDTAVYYCAKGRIPSLLFDYWGQGTLVTVSS (SEQ ID NO: 124)
BMS3h-147
EVQLLESGGGLVQPGGSLRLSCAASGFTFAQYHMRWVRQAPGKGLEWVSTINDIGSNTYYADSVKGRFTISRDNSKNTL
YLQMNSLRAEDTAVYYCAKVGGRGSFSFDYWGQGTLVTVSS (SEQ ID NO: 125)
BMS3h-148
EVQLLESGGGLVQPGGSLRLSCAASGFTFSSYDMKWVRQAPGKGLEWVSTISASGVFTYYADSVKGRFTISRDNSKNTL
YLQMNSLRAEDTAVYYCAKREHAGQPPFDYWGQGTLVTVSS (SEQ ID NO: 126)
BMS3h-149
EVQLLESGGGLVQPGGSLRLSCAASGFTFNGYAMSWVRQAPGKGLEWVSTINANGKYTYYADSVKGRFTISRDNSKNTL
YLQMNSLRAEDTAVYYCAKKLTLASNYFDYWGQGTLVTVSS (SEQ ID NO: 127)
BMS3h-150
EVQLLESGGGLVQPGGSLRLSCAASGFTFMDYDMKWVRQAPGKGLEWVSSITALGKKTYYADSVKGRFTISRDNSKNTL
YLQMNSLRAEDTAVYYCAKDSVKYPLNLFDYWGQGTLVTVSS (SEQ ID NO: 128)
BMS3h-151
EVQLLESGGGLVQPGGSLRLSCAASGFTFPHYTMAWVRQAPGKGLEWVSSIQSPGWRTYYADSVKGRFTISRDNSKNTL
YLQMNSLRAEDTAVYYCAKYGDGLPLTFDYWGQGTLVTVSS (SEQ ID NO: 129)
BMS3h-167
EVQLLESGGGLVQPGGSLRLSCAASGFTFSGTPMSWVRQAPGKGLEWVSRIGDEGQETYYADSVKGRFTISRDNSKNTL
YLQMNSLRAEDTAVYYCAKGVTPDLTFDYWGQGTLVTVSS (SEQ ID NO: 130)
BMS3h-168
EVQLLESGGGLVQPGGSLRLSCAASGFTFSSSSMSWVRQAPGKGLEWVSAIGSDGPSTYYADSVKGRFTISRDNSKNTL
YLQMNSLRAEDTAVYYCAKGRIPTLHFDYWGQGTLVTVSS (SEQ ID NO: 131)
BMS3h-169
EVQLLESGGGLVQPGGSLRLSCAASGFTFNPGEMTWVRQAPGKGLEWVSSIDGSGSSTYYADSVKGRFTISRDNSKNTL
YLQMNSLRADDTAVYYCAKGRIPTLHFDYWGQGTLVTVSS (SEQ ID NO: 132)
BMS3h-170
EVQLLESGGGLVQPGGSLRLSCAASGFTFPESMMGWVRQAPGKGLEWVSSIGYPGATTYYADSVKGRFTISRDNSKNTL
YLQMNSLRAEDTAVYYCAKGGSRDDNFDYWGQGTLVTVSS (SEQ ID NO: 133)
BMS3h-171
EVQLLESGGGLVQPGGSLRLSCAASGFTFGQHSMHWVRQAPGKGLEWVSSISVPGPKTYYADSVKGRFTISRDNSKNTL
YLQMNSLRAEDTAVYYCAKSLRDLRPGDSKSFDYWGQGTLVTVSS (SEQ ID NO: 134)
BMS3h-197
EVQLLESGGGLVQPGGSLRLSCAASGFTFGSAAMDWVRQAPGKGLEWVSSINDMGSNTYYADSVKGRFTISRDNSKNTL
YLQMNSLRAEDTAVYYCAKQGGRFDYWGQGTLVTVSS (SEQ ID NO: 135)
BMS3h-199
EVQLLESGGGLVQPGGSLRLSCAASGFTFGYDRMAWVRQAPGKGLEWVSSIDGPGGATYYADSVKGRFTISRDNSKNTL
YLQMNSLRAEDTAVYYCAEGRRVPDFDYWGQGTLVTVSS (SEQ ID NO: 136)
BMS3h-200
EVQLLESGGGLVQPGGSLRLSCAASGFTFGEYEMTWVRQAPGKGLEWVSRIDPFGSETYYADSVKGRFTISRDNSKNTL
YLQMNSLRAEDTAVYYCAEGVVPDLNFDYWGQGTLVTVSS (SEQ ID NO: 137)
BMS3h-201
EVQLLESGGGLVQPGGSLRLSCAASGFTFDKYVMGWVRQAPGKGLEWVSTIGSYGGATYYADSVKGRFTISRDNSKNTL
YLQMNSLRAEDTAVYYCAKRLTLSATKFDYWGQGTLVTVSS (SEQ ID NO: 138)
BMS3h-203
EVQLLESGGGLVQPGGSLRLSCAASGFTFEDYVMGWVRQAPGKGLEWVSTIAHRGDITYYADSVKGRFTISRDNSKNTL
YLQMNSLRAEDTAVYYCAKRRRLSDYRFDYWGQGTLVTVSS (SEQ ID NO: 139)
BMS3h-204
EVQLLESGGGLVQPGGSLRLSCAASGFTFGQFDMYWVRQAPGKGLEWVSAISPAGTGTYYADSVKGRFTISRDNSKNTL
YLQMNSLRAEDTAVYYCAKAGDRSSLFDYRGQGTLVTVSS (SEQ ID NO: 140)
BMS3h-205
EVQLLESGGGLVQPGGSLRLSCAASGFTFKDTGMTWVRQAPGKGLEWVSSISSYGRDTYYADSVKGRFTISRDNSKNTL
YLQMNSLRAEDAAVYYCAKLNAALGFDYWGQGTLVTVSS (SEQ ID NO: 141)
BMS3h-206
EVQLLESGGGLVQPGGSLRLSCAASGFTFGPYPMSWVRQAPGKGLEWVSGINAPGTRTYYADSVKGRFTISRDNSKNTL
YLQMNSLRAEDTAVYYCAQQMSSGVFDYWGQGTLVTVSS (SEQ ID NO: 142)
BMS3h-207
EVQLLESGGGLVQPGGSLRLSCAASGFTFSNQDMTWVRQAPGKGLEWVSSIDSSGQLTYYADSVKGRFTISRDNSKNTL
YLQMNSLRAEDTAVYYCAKVKSLARFDYWGQGTLVTVSS (SEQ ID NO: 143)
BMS3h-208
EVQLLESGGGLVQPGGSLRLSCAASGFTFPESDMKWVRQAPGKGLEWVSSISPNGWDTYYADSVKGRFTISRDNSKNTL
YLQMNSLRAEDTAVYYCAKPAQVLFDYWGQGTLVTVSS (SEQ ID NO: 144)
BMS3h-209
EVQLLESGGGLVQPGGSLRLSCAASGFTFEQYVMGWVRQAPGKGLEWVSTIGTSGKYTYYADSVKGRFTISRDNSKNTL
YLQMNSLRAEDTAVYYCAQRRSLTRVHFDYWGQGTLVTVSS (SEQ ID NO: 145)
BMS3h-210
EVQLLESGGGLVQPGGSLRLSCAASGFTFGVEHMSWVRQAPGKGLEWVSAITGDGDRTYYADSVKGRFTISRDNSKNTL
YLQMNSLRAEDTAVYYCAKTVSWNGRFDYWGQGTLVTVSS (SEQ ID NO: 146)
BMS3h-211
EVQLLESGGGLVQPGGSLRLSCAASGFTFAWYNMGWVRQAPGKGLEWVSRIAPSGIITYYADSVKGRFTISRDNSKNTL
YLQMNSLRAEDTAVYYCAKGLRGKFDYWGQGTLVTVSS (SEQ ID NO: 147)
BMS3h-212
EVQLLESGGGLVQPGGSLRLSCAASGFTFSNYEMRWVRQAPGKGLEWVSSISSAGTDTYYADSVKGRFTISRDNSKNTL
YLQMNSLRAEDTAVYYCAKQSLNFDYWGQGTLVTVSS (SEQ ID NO: 148)
BMS3h-213
EVQLLESGGGLVQPGGSLRLSCVASGFTFDEEPMTWVRQAPGKGLEWVSIIDPGGGATYYADSVKGRFTISRDNSKNTL
YLQMNSLRAEDTAVYYCAKSNSMFDYWGQGTLVTVSS (SEQ ID NO: 149)
BMS3h-214
EVQLLESGGGLVQPGGSLRLSCAASGFTFSAYPMHWVRQAPGKGLEWVSSIASSGITTYYADSVKGRFTISRDNSKNTL
YLQMNSLRAEDTAVYYCAKFTRLHFPAQFDYWGQGTLVTVSS (SEQ ID NO: 150)
BMS3h-215
EVQLLESGGGLVQPGGSLRLSCAASGFTFADYAMGWVRQAPGKGLEWVSRISPEGSRTYYADSVKGRFTISRDNSKNTL
YLQMNSLRAEDTAVYYCAKLRPYASKFDYWGQGTLVTVSS (SEQ ID NO: 151)
BMS3h-230
EVQLLESGGGLVQPGGSLRLSCAASGFTFRPYDMGWVRQAPGKGLEWVSTISHQGNRTYYADSVKGRFTISRDNSKNTL
YLQMNSLRAEDTAVYYCAKVSHHFDYWGQGTLVTVSS (SEQ ID NO: 152)
BMS3h-231
EVQLLESGGGLVQPGGSLRLSCAASGFTFSAYNMWWARQAPGKGLEWVSWINSTGSRTYYADSVKGRFTISRDNSKNTL
YLQMNSLRAEDTAVYYCAKNWHRGRFDYWGQGTLVTVSS (SEQ ID NO: 153)
BMS3h-232
EVQLLESGGGLVQPGGSLRLSCAASGFTFDRYRMGWVRQAPGKGLEWVSTINRLGQSTYYADSVKGRFTISRDNSKNTL
YLQMNSLRAEDTAVYYCAKVKKHKFDYWGQGTLVTVSS (SEQ ID NO: 154)
BMS3h-233
EVQLLESGGGLVQPGGSLRLSCAASGFTFAHYNMRWVRQAPGKGLEWVSTITKTGFRTYYADSVKGRFTISRDNSKNTL
YLQMNSLRAEDTAVYYCAKAGQFDFDYWGQGTLVTVSS (SEQ ID NO: 155)
BMS3h-234
EVQLLESGGGLVQPGGSLRLSCAASGFTFYPYSMHWVRQAPGKGLEWVSTIDGSGMFTYYADSVKGRFTISRDNSKNTL
YLQMNSLRAEDTAVYYCAEDSLKASFDYWGQGTLVTVSS (SEQ ID NO: 156)
BMS3h-235
EVQLLESGGGLVQPGGSLRLSCAASGFTFPLYGMWWVRQAPGKGLEWVSYIGPYGHTTYYADSVKGRFTISRDNSKNTL
YLQMNSLRAEDTAVYYCAKKRKKKFDYWGQGTLVTVSS (SEQ ID NO: 157)
BMS3h-236
EVQLLESGGGLVQPGGSLRLSCAASGFTFPRYRMSWVRQAPGKGLEWVSSITPYGAHTYYADSVKGRFTISRDNSKNTL
YLQMNSLRAEDTAVYYCAKYGKWYFDYWGQGTLVTVSS (SEQ ID NO: 158)
BMS3h-237
EVQLLESGGGLVQPGGSLRLSCAASGFTFNEYAMRWVRQAPGKGLEWVSTIDRLGLHTYYADSVKGRFTISRDNSKNTL
YLQMNSLRAEDTAVYYCAKSGPFTFDYWGQGTLVTVSS (SEQ ID NO: 159)
BMS3h-238
EVQLLESGGGLVQPGGSLRLSCAASGFTFERYNMRWVRQAPGKGLEWVSTIDRLGLATYYADSVKGRFTISRDNSKNTL
YLQMNSLRAEDTAVYYCAKAGSWSFDYWGQGTLVTVSS (SEQ ID NO: 160)
BMS3h-239
EVQLLESGGGLVQPGGSLRLSCAASGFTFGIYDMKWVRQAPGKGLEWVSTISSSGTHTYYADSVKGRFTISRDNSKNTL
YLQMNSLRAEDTAVYYCAKYPQPYPFDYWGQGTLVTVSS (SEQ ID NO: 161)
BMS3h-240
EVQLLESGGGLVQPGGSLRLSCAASGFTFWWDMRWRQAPGKGLEWVSTISATGVHTYYADSVKGRFTISRDNSKNTL
YLQMNSLRAEDTAVYYCAKYPPAGRFDYWGQGTLVTVSS (SEQ ID NO: 162)
BMS3h-241
EVQLLESGGGLVQPGGSLRLSCAASGFTFSTYDMIWVRQAPGKGLEWVSAISPNGTGTYYADSVKGRFTISRDNSKNTL
YLQMNSLRAEDTAVYYCAKPPQVNTEFDYRGQGTLVTVSS (SEQ ID NO: 163)
BMS3h-243
EVQLLESGGGLVQPGGSLRLSCAASGFTFEKEDMGWVRQAPGKGLEWVSHISPNGYATYYADSVKGRFTISRDNSKNTL
YLQMNSLRAEDTAVYYCAKSWSSFDYWGQGTLVTVSS (SEQ ID NO: 164)
BMS3h-244
EVQLLESGGGLVQPGGSLRLSCAASGFTFSATPMEWARQAPGKGLEWVSTISESGYSTYYADSVKGRFTISRDNSKNTL
YLQMNSLRAEDTAVYYCAKWNSTTGFDYWGQGTLVTVSS (SEQ ID NO: 165)
BMS3h-245
EVQLLESGGGLVQPGGSLRLSCAASGFTFNTVDMEWVRQAPGKGLEWVSSISPNGWDTYYADSVKGRFTISRDNSKNTL
YLQMNSLRAEDTAVYYCAEAPHRAFDYWGQGTLVTVSS (SEQ ID NO: 166)
BMS3h-246
EVQLLESGGGLVQPGGSLRLSCAASGFTFEDKEMSWVRQAPGKGLEWVSRIDALGDSTYYADSVKGRFTISRDNSKNTL
YLQMNSLRAEDTAVYYCAEGMVPRLKFDYWGQGTLVTVSS (SEQ ID NO: 167)
BMS3h-247
EVQLLESGGGLVQPGGSLRLSCAASGFTFSDHSMMWVRQAPGKGLEWVSDIEPHGVHTYYADSVKGRFTISRDNSKNTL
YLQMNSLRAEDTAVYYCANPTFDYWGQGTLVTVSS (SEQ ID NO: 168)
BMS3h-248
EVQLLESGGGLVQPGGSLRLSCAASGFTFSPHTMHWVRQAPGKGLEWVSGIGPDGTTTYYADSVKGRFTISRDNSKNTL
YLQMNSLRAEDTAVYYCAKRSYSWDRGWTFDYWGQGTLVTVSS (SEQ ID NO: 169)
BMS3h-249
EVQLLESGGGLVQPGGSLRLSCAASGFTFYASDMKWVRQAPGKGLEWVSSISPNGWDTYYADSVKGRFTISRDNSKNTL
YLQMNSLRAEDTAVYYCAKADYTYHSFDYWGQGTLVTVSS (SEQ ID NO: 170)
BMS3h-250
EVQLLESGGGLVQPGGSLRLSCAASGFTFAHYNMRWVRQAPGKGLEWVSTITKTGFRTYYADSVKGRFTISRDNSKNTL
YLQMNSLRAEDTAVYYCAKAGQFDFDYWGQGTLVTVSS (SEQ ID NO: 171)
BMS3h-251
EVQLLESGGGLVQPGGSLRLSCAASGFTFSHYHMGWARQAPGKGLEWVSVIGPRGISTYYADSVKGRFTISRDNSKNTL
YLQMNSLRAEDTAVYYCAKSPSRHRFDYWGQGTLVTVSS (SEQ ID NO: 172)
BMS3h-252
EVQLLESGGGLVQPGGSLRLSCAASGFTFNEYAMRWVRQAPGKGLEWVSTIDRLGLHTWADSVKGRFTISRDNSKNTL
YLQMNSLRAEDTAVYYCAKSGPFTFDYWGQGTLVTVSS (SEQ ID NO: 173)
BMS3h-253
EVQLLESGGGLVQPGGSLRLSCAASGFTFGNYSMKWARQAPGKGLEWVSTITPDGWYTYYADSVKGRFTISRDNSKNTL
YLQMNSLRAEDTAVYYCAKVGDAVWGWIGGFDYWGQGTLVTVSS (SEQ ID NO: 174)
BMS3h-254
EVQLLESGGGLVQPGGSLRLSCAASGFTFGDYGMKWVRQAPGKGLEWVSAITSNGDFTYYADSVKGRFTISRDNSKNTL
YLQMNSLRAEDTAVYYCAKSLYKFDYWGQGTLVTVSS (SEQ ID NO: 175)
BMS3h-255
EVQLLESGGGLVQPGGSLRLSCAGSGFTFPTYKMGWVRQAPGKGLEWVSFIDYWGWRTYYADSVKGRFTISRDNSKNTL
YLQMNSLRAEDTAVYYCAKSPYSWTHDSPHFDYWGQGTLVTVSS (SEQ ID NO: 176)
BMS3h-256
EVQLLESGGGLVQPGGSLRLSCAASGFTFRPYTMCWARQAPGKGLEWVSCISDAGSFTYYADSVKGRFTISRDNSKNTL
YLQMNSLRAEDTAVYYCAKRMSSFDYWGQGTLVTVSS (SEQ ID NO: 177)
BMS3h-257
EVQLLESGGGLVQPGGSLRLSCAASGFTFQNYQMAWVRQAPGKGLEWVSTISGTGKNTYYADSVKGRFTISRDNSKNTL
YLQMNSLRAEDTAVYYCAKTPQNYFSVRRFDYWGQGTLVTVSS (SEQ ID NO: 178)
BMS3h-258
EVQLLESGGGLVQPGGSLRLSCAASGFTFGAYTMGWVRQAPGKGLEWVSKISTSGGQTYYADSVKGRFTISRDNSKNTL
YLQMNSLRAEDTAVYYCAKPLNWWAFDYWGQGTLVTVSS (SEQ ID NO: 179)
BMS3h-272
EVQLLESGGGLVQPGGSLRLSCAASGFTFNAYPMTWVRQAPGKGLEWVSRIDGYGRHTYYADSVKGRFTISRDNSKNTL
YLQMNSLRAEDTAVYYCAKGIIPNFDYWGQGTLVTVSS (SEQ ID NO: 180)
BMS3h-273
EVQLLESGGGLVQPGGSLRLSCAASGFTFGAVDMTWVRQAPGKGLEWVSAISPSGSATYYADSVKGRFTISRDNSKNTL
YLQMNSLRAEDTAVYYCAKGRVPDLGFDYWGQGTLVTVSS (SEQ ID NO: 181)
BMS3h-274
EVQLLESGGGLVQPGGSLRLSCAASGFTFDSYAMGWARQAPGKGLEWVSAIGAKGLSTYYADSVKGRFTISRDNSKNTL
YLQMNSLRAEDTAVYYCAKAARGKFDYWGQGTLVTVSS (SEQ ID NO: 182)
BMS3h-275
EVQLLESGGGLVQPGGSLRLSCAASGFTFTRYQMGWVRQAPGKGLEWVSVINVWGSSTYYADSVKGRFTISRDNSKNTL
YLQMNSLRAEDTAVYYCAKMSGKFAYWGQGTLVTVSS (SEQ ID NO: 183)
BMS3h-276
EVQLLESGGGLVQPGGSLRLSCAASGFTFGNYSMMWVRQAPGKGLEWVSTIIPAGTSTYYADSVKGRFTISRDNSKNTL
YLQMNSLRAEDTAVYYCAKPSIRLFDYWGQGTLVTVSS (SEQ ID NO: 184)
BMS3h-279
EVQLLESGGGLVQPGGSLRLSCAASGFTFGAYDMGWVRQAPGKGLEWVSWISPNGYDTYYADSVKGRFTISRDNSKNTL
YLQMNSLRAEDTAVYYCAKGGVKFDYWGQGTLVTVSS (SEQ ID NO: 185)
BMS3h-282
EVQLLESGGGLVQPGGSLRLSCAASGFTFVWYEMAWVRQAPGKGLEWVSTIQADGEQTYYADSVKGRFTISRDNSKNTL
YLQMNSLRAEDTAVYYCAKASYALVYPPEEFDYWGQGTLVTVSS (SEQ ID NO: 186)
BMS3h-287
EVQLLESGGGLVQPGGSLRLSCAASGFTFTNYRMSWVRQAPGKGLEWVSAIDDLGVSTYYADSVKGRFTISRDNSKNTL
YLQMNSLRAEDTAVYYCAKWRLKNSQPTDFDYWGQGTLVTVSS (SEQ ID NO: 187)
BMS3h-292
EVQLLESGGGLVQPGGSLRLSCAASGFTFDQAHMWWVRQAPGKGLEWVSFINPSGYYTYYADSVKGRFTISRDNSKNTL
YLQMNSLRAEDTAVYYCAKPSLSPSSFDYWGQGTLVTVSS (SEQ ID NO: 188)
BMS3h-293
EVQLLESGGGLVQPGGSLRLSCAASGFTFETGQMGWARQAPGKGLEWVSNIDGSGTYTYYADSVKGRFTISRDNSKNTL
YLQMNSLRAEDTAVYYCAKSTQNYRFDYWGQGTLVTVSS (SEQ ID NO: 189)
BMS3h-296
EVQLLESGGGLVQPGGSLRLSCAASGFTFGAYPMYWVRQAPGKGLEWVSSIHKDGRITYYADSVKGRFTISRDNSKNTL
YLQMNSLRAEDTAVYYCAKQGTPVDGFDYWGQGTLVTVSS (SEQ ID NO: 190)
BMS3h-297
EVQLLESGGGLVQPGGSLRLSCAASGFTFPDEGMTWVRQAPGKGLEWVSTIETGGTVTYYADSVKGRFTISRDNSKNTL
YLQMNSLRAEDTAVYYCAKMDGSGTWQTFDYWGQGTLVTVSS (SEQ ID NO: 191)
BMS3h-298
EVQLLESGGGLVQPGGSLRLSCAASGFTFDSLGMGWARQAPGKGLEWVSYIRAEGAYTYYADSVKGRFTISRDNSKNTL
YLQMNSLRAEDTAVYYCAKYLADSDYWGQGTLVTVSS (SEQ ID NO: 192)
BMS3h-299
EVQLLESGGGLVQPGGSLRLSCAASGFTFSESYMEWVRQAPGKGLEWVSGIDHIGGGTYYADSVKGRFTISRDNSKNTL
YLQMNSLRAEDTAVYYCAKDDGRGGSMFDYWGQGTLVTVSS (SEQ ID NO: 193)
BMS3h-300
EVQLLESGGGLVQPGGSLRLSCAASGFTFSGGYMWWVRQAPGKGLEWVSSIGASGAYTYYADSVKGRFTISRDNSKNTL
YLQMNSLRAEDTAVYYCAKTGGRLDYWGQGTLVTVSS (SEQ ID NO: 194)
BMS3h-301
EVQLLESGGGLVQPGGSLRLSCAASGFTFDEGHMGWVRQAPGKDLEWVSYIGSLGLHTYYADSVKGRFTISRDNSKNTL
YLQMNSLRAEDTAVYYCAKREFSNGGFDYWGQGTLVTVSS (SEQ ID NO: 195)
BMS3h-302
EVQLLESGGGLVQPGGSLRLSCAASGFTFKTSPMYWVRQAPGKGLEWVSSIDRTGGHTYYADSVKGRFTISRDNSKNTL
YLQMNSLRAEDTAVYYCAKQALLTDAKRFDYWGQGTLVTVSS (SEQ ID NO: 196)
BMS3h-303
EVQLLESGGGLVQPGGSLRLSCAASGFTFDGRDMVWVRQAPGKGLEWVSAISPSGLDTYYADSVKGRFTISRDNSKNTL
YLQMNSLRAEDTAVYYCAERPQMLVTNFDYWGQGTLVTVSS (SEQ ID NO: 197)
BMS3h-304
EVQLLESGGGLVQPGGSLRLSCAASGFTFGNDPMSWVRQAPGKGLEWVSGIGREGDSTYYADSVKGRFTISRDNSKNTL
YLQMNSLRAEDTAVYYCAKDSMRHQPFDYWGQGTLVTVSS (SEQ ID NO: 198)
BMS3h-305
EVQLLESGGGLVQPGGSLRLSCAASGFTFDETYMKWVRQAPGKGLEWVSAIGASGADTYYADSVKGRFTISRDNSKNTL
YLQMNSLRAEDTAVYYCAKFTHLNGRFDYWGQGTLVTVSS (SEQ ID NO: 199)
BMS3h-306
EVQLLESGGGLVQPGGSLRLSCAASGFTFGGWPMGWVRQAPGKGLEWVSGIDIDGAPTYYADSVKGRFTISRDNSKNTL
YLQMNSLRAEDTAVYYCAKEEAGSWSFDYWGQGTLVTVSS (SEQ ID NO: 200)
BMS3h-307
EVQLLESGGGLVQPGGSLRLSCAASGFTFSDQAMWWARQAPGKGLEWVSFIQGDGGFTYYADSVKGRFTISRDNSKNTL
YLQMNSLRAEDTAVYYCAKPSKPFDYWGQGTLVTVSS (SEQ ID NO: 201)
BMS3h-308
EVQLLESGGGLVQPGGSLRLSCAASGFTFETGQMGWARQAPGKGLEWVSNIDGSGTYTYYADSVKGRFTISRDNSKNTL
YLQMNSLRAEDTAVYYCAKAVRNFAFDYWGQGTLVTVSS (SEQ ID NO: 202)
BMS3h-309
EVQLLESGGGLVQPGGSLRLSCAASGFTFSGHDMSWVRQAPGKGLEWVSAISPHGTHTYYADSVKGRFTISRDNSKNTL
YLQMNSLRAEDTAVYYCAKGIRGWIGHDTQPFDYWGQGTLVTVSS (SEQ ID NO: 203)
BMS3h-310
EVQLLESGGGLVQPGGSLRLSCAASGFTFESKDMLWVRQAPGKGLEWVSSISSDGTHTYYADSVKGRFTISRDNSKNTL
YLQMNSLRAEDTAVYYCAQELGGSWQFDYWGQGTLVTVSS (SEQ ID NO: 204)
BMS3h-311
EVQLLESGGGLVQPGGSLRLSCAASGFTFADRDMVWVRQAPGKGLEWVSGIGASGTSTYYADSVKGRFTISRDNSKNTL
YLQMNSLRAEDAAVYYCAKGGTGPTDLWDFDYWGQGTLVTVSS (SEQ ID NO: 205)
BMS3h-312
EVQLLESGGGLVQPGGSLRLSCAASGFTFDDEKMLWVRQAPGKGLEWVSSISVSGLHTYYADSVKGRFTISRDNSKNTL
YLQMNSLRAEDTAVYYCAKEEAGSWSFDYWGQGTLVTVSS (SEQ ID NO: 206)
BMS3h-313
EVQLLESGGGLVQPGGSLRLSCAASGFTFGQERMIWVRQAPGKGLEWVSDISASGGTTYYADSVKGRFTISRDNSKNTL
YLQMNSLRAEDTAVYYCAKEEAGSWSFDYWGQGTLVTVSS (SEQ ID NO: 207)
BMS3h-37-1
EVQLLESGGGLVQPGGSLRLSCAASGFTFEWYEMQWVRQAPGKGLEWVSAISGDGYRTYYADSVKGRFTISRDNSMNTL
YLQMNSLRAEDTAVYYCAKELGYFDYRGRGTLVTVSS (SEQ ID NO: 208)
BMS3h-37-2
EVQLLESGGGLVQPGGSLRLSCAASGFTFEWYEMQWVRRAPGKGLEWVSAISGDGYRTYYADSVKGRFTISRDNSKNTL
YLQMNSLRAEDTAVYYCAKELGYFDYWGRGTLVTVSS (SEQ ID NO: 209)
BMS3h-37-3
EVQLLESGGGLVQPGGSLRLSCAASGFTFEWYEMQWVRRAPGKGLEWVSAISGDGYRTYYADSVKGRFTISRDNSKNTL
YLQMNSLRAEDTAVYYCAKELGYFDYRVQGTLVTVSS (SEQ ID NO: 210)
BMS3h-37-4
EVQLLESGGGLVQPGGSLRLSCAASGFTFEWYEMQWVRKAPGKGLEWVSAISGDGYRTYYADSVKGRFTISRDNSKNTL
YLQMNSLRAEDTAVYYCAKELGYFDYWGRGTLVTVSS (SEQ ID NO: 211)
BMS3h-37-5
EVQLLESGGGLVQPGGSLRLSCAASGFTFEWYEMQWVRQAPGKGLEWISAISGDGYRTYYADSVKGRFTISRDNSKNTL
YLQMNSLRAEDTAVYYCAKELGYFDYRVQGTLVTVSS (SEQ ID NO: 212)
BMS3h-37-6
EVQLLESGGGLVQPGGSLRLSCAASGFTFEWYEMQWVRRAPGKGLEWVSAISGDGYRTYYADSVKGRFTISRDNSENTL
YLQMNSLRAEDTAVYYCAKELGYFDYWGRGTLVTVSS (SEQ ID NO: 213)
BMS3h-37-7
EVQLLETGGGLVQPGGSLRLSCAASGFTFEWYEMQWVRRAPGKGLEWVSAISGDGYRTYYADSVKGRFTISRDNSKNTL
YLQMDSLRAEDTAVYYCAKELGYFDYWGRGTLVTVTS (SEQ ID NO: 214)
BMS3h-37-8
EVQLLESGGGLVQPGGSLRLSCAASGFTFEWYEMQWVRQAPGKGLEWVSAISGDGYRTYYADSVKGRFTISRDNSKNTL
YLQMNSLRAEDTAVYYCAKELGYFHYWGRGTLVTVSS (SEQ ID NO: 215)
BMS3h-37-9
EVQLLESGGGLVQPGGSLRLSCVASGFTFEWYEMQWVRQAPGNGLEWISAISGDGYRTYYADSVKGRFTISRDNSKNTL
YLQMNSLRAEDTAVYYCAKELGYFDYWGRGTLVTVSS (SEQ ID NO: 216)
BMS3h-37-10
EVQLLESGGGLVQPGGSLRLSCAASGFTFEWYEMQWVRRAPGKGLEWVSAISGDGYRTYYADSVKGRFTISRDNSKNTL
YLLMNSLRAEDTAVYYCAKELGYFDYWGRGTLVTVSS (SEQ ID NO: 217)
BMS3h-37-11
EVQLLESGGGLVQPGGSLRLSCAASGFTFEWYEMQWVRKAPGKGLEWVSAISGDGYRTYYADSVKGRFTISRDNSKNTL
YLQMNSLRAEDTAVYYCAKELGYFDYRGRGTLVTVSS (SEQ ID NO: 218)
BMS3h-37-12
EVQLLESGGGLVQPGGSMRLSCAASGFTFEWYEMQWVRRAPGKGLEWVSAISGDGYRTYYADSVKGRFTISRDNSKNTL
YLQMNSLRAEDTAVYYCAKELGYFDYRGRGTLVTVSS (SEQ ID NO: 219)
BMS3h-37-201
EVQLLESGGGLVQPGGSLRLSCAASGFTFEWYEMQWVRRAPGKGLEWVSMISGDGYRTYYADSVKGRFTISRDNSKNTL
YLQMNSLRAEDTAVYYCAKELGYFDYWGRGTLVTVSS (SEQ ID NO: 220)
BMS3h-37-202
EVQLLESGGGLVQPGGSLRLSCAASGFTFEWYEMQWVRRAPGKGLEWVSAISGDGWRTYYADSVKGRFTISRDNSKNTL
YLQMNSLRAEDTAVYYCAKELGYFDYWGRGTLVTVSS (SEQ ID NO: 221)
BMS3h-37-203
EVQLLESGGGLVQPGGSLRLSCAASGFTFGWYEMQWVRRAPGKGLEWVSAISGDGYRTYYADSVKGRFTISRDNSKNTL
YLQMNSLRAEDTAVYYCAKELLYFDYWGRGTLVTVSS (SEQ ID NO: 222)
BMS3h-37-204
EVQLLESGGGLVQPGGSLRLSCAASGFTFEWYEMQWVRRAPGKGLEWVSAISGDGYRTYYADSVKGRFTISRDNSKNTL
YLQMNSLRAEDTAVYYCAKELGFFDYWGRGTLVTVSS (SEQ ID NO: 223)
BMS3h-37-205
EVQLLESGGGLVQPGGSLRLSCAASGFTFEWYEMQWVRRAPGKGLEWVSAISGDGYRTYYADSVKGRFTISRDNSKNTL
YLQMNSLRAEDTAVYYCAKELEYFDYWGRGTLVTVSS (SEQ ID NO: 224)
BMS3h-37-206
EVQLLESGGGLVQPGGSLRLSCAASGFTFEWYEMQWVRRAPGKGLEWVSAISGDGYRTYYADSVKGRFTISRDNSKNTL
YLQMNSLRAEDTAVYYCAKGLEYFDYWGRGTLVTVSS (SEQ ID NO: 225)
BMS3h-37-207
EVQLLESGGGLVQPGGSLRLSCAASGFTFEWYEMQWVRRAPGKGLEWVSAISGDGYRTYYADSVKGRFTISRDNSKNTL
YLQMNSLRAEDTAVYYCAKELAFFDYWGRGTLVTVSS (SEQ ID NO: 226)
BMS3h-37-208
EVQLLESGGGLVQPGGSLRLSCAASGFTFEWYEMQWVRRAPGKGLEWVSAISGDGYRTYYADSVKGRFTISRDNSKNTL
YLQMNSLRAEDTAVYYCAKELLYFDYWGRGTLVTVSS (SEQ ID NO: 227)
BMS3h-37-209
EVQLLESGGGLVQPGGSLRLSCAASGFTFEWYEMQWVRRAPGKGLEWVSAISGDGYRTYYADSVKGRFTISRDNSKNTL
YLQMNSLRAEDTAVYYCAKELEFFDYWGRGTLVTVSS (SEQ ID NO: 228)
BMS3h-37-210
EVQLLESGGGLVQPGGSLRLSCAASGFTFEWYEMQWVRRAPGKGLEWVSAISGDGYRTYYADSVKGRFTISRDNSKNTL
YLQMNSLRAEDTAVYYCAKELQFFDYWGRGTLVTVSS (SEQ ID NO: 229)
BMS3h-37-211
EVQLLESGGGLVQPGGSLRLSCAASGFTFEWYEMQWVRRAPGKGLEWVSAISGDGYRTYYADSVKGRFTISRDNSKNTL
YLQMNSLRAEDTAVYYCAKELLFFDYWGRGTLVTVSS (SEQ ID NO: 230)
BMS3h-37-212
EVQLLESGGGLVRPGGSLRLSCAASGFTFEWYEMQWVRRAPGKGLEWVSAISGDGYRTYYADSVKGRFTISRDNSKNTL
YLQMNSLRAEDTAVYYCAKELEFFDYWGRGTLVTVSS (SEQ ID NO: 231)
BMS3h-37-213
EVQLLESGGGLVQPGGSLRLSCAASGFTFEWYEMQWVRRAPGKGLEWVSAISGDGYRTYYADSVKGRFTISRDNSKNTL
YLQMNSLRAEDTAVYYCAKELLFFDYRGRGTLVTVSS (SEQ ID NO: 232)
BMS3h-37-214
EVQLLESGGGLVQPGGSLRLSCAASGFTFEWYEMQWVRRAPGKGLEWVSAISGDGYRTYYADSVKGRFTISRDNSKNTL
YLQMNSLRAEDTAVYYCAKNLEYFDYWGRGTLVTVSS (SEQ ID NO: 233)
BMS3h-37-215
EVRLLESGGGLVQPGGSLRLSCAASGFTFEWYEMQWVRRAPGKGLEWVSAISGDGYRTYYADSVKGRFTISRDNSKNTL
YLQMNSLRAEDTAVYYCAKELQFFDYWGRGTLVTVSS (SEQ ID NO: 234)
BMS3h-38-1
EVQLLGSGGGLVQPGGSLRLSCAASGFTFEEEEMIWVRQAPGKGLEWVSAISGSGGSTYYADSVKGRFTISRDNSKNTL
YLQMNSLRAEDTAVYYCSKEPFRFDYWGQGTLVTVSS (SEQ ID NO: 235)
BMS3h-38-2
EVQLLASGGGLVQPGGSLRLSCAASGFTFEEEEMIWVRQAPGKGLEWVSAISGSGGSTYYADSVKGRFTISRDNSKNTL
YLQMNSLRAEDTAVYYCGKEPFRYDYWGQGTLVTVSS (SEQ ID NO: 236)
BMS3h-38-3
EVQLLASGGGLVQPGGSLRLSCAASGFTFEEEEMIWVRQAPGKGLEWISAISGSGGSTYYADSVKGRFTISRDNSKNTL
YLQMNSLRAEDTAVYYCGKEPFRFDYWGQGTLVTVSS (SEQ ID NO: 237)
BMS3h-38-4
EVQLLDPGGGLVQPGGSLRLSCAASGFTFGKEEMIWVRQAPGKGLEWVSSISGSGGSTYYADSVKGRFTISRDNSRNTL
YLQMNSLRAEDTAVYYCGKEPFRFDYWGQGTLVTVSS (SEQ ID NO: 238)
BMS3h-38-5
EVQLLGSGGGLVQPGGSLRLSCAASGFTEEEEMIWVRQAPGKGLEWVSAISGSGGSTYYADSVKGRFTISRDNSKNTL
YLQMNSLRAEDTAVYYCGKEPFRFDYWGQGTLVTVSS (SEQ ID NO: 239)
BMS3h-38-6
EVQLLEPGGGLVQPGGSLRLSCAASGFTFEEEEMIWVRQAPGKGLEWVSAISGSGGSTYYADSVKGRFTISRDNSKNTL
YLLMNSLRAEDTAVYYCSKEPFRFDYWGQGALVTVSS (SEQ ID NO: 240)
BMS3h-38-7
EVQLLDPGGGLVQPGGSLRLSCAASGFTFGKEEMIWVRQAPGKGLEWVSSISGSGGSTYYADSVKGRFTISRDNSKNTL
YLQMNSLRAEDTAVYYCAKEPLRFDYWGQGTLVTVSS (SEQ ID NO: 241)
BMS3h-38-8
EVQLLESGGGLVQPGGSLRLSCAASGFTFEEEEMIWVRQAPGKGLEWISAISGSGGSTYYADSVKGRFTIHRDNSKNTL
YLQMNSLRAEDTAVYYCSKEPFRFDYRGLGTLVTVSS (SEQ ID NO: 242)
BMS3h-38-9
EVQLLDPGGGLVQPGGSLRLSCAASGFTFGKEEMIWVRQAPGKGLEWVSSISGSGGSTYYADSVKGRFTISRDNSRNTL
YLQMNSLRAEDTAVYYCAKEPLRFDYWGQGTLVTVSS (SEQ ID NO: 243)
BMS3h-38-10
EVQLLDSGGGFVQPGGSLRLSCAASGFTFEEEEMIWVRQAPGKGLEWISAISGSGGSTYYADSVKGRFTISRDNSKNTL
YLQMNSLRAEDTAVYYCAKEPFRFDYWGQGTLVTVSS (SEQ ID NO: 244)
BMS3h-38-11
EVQLLDPGGGLVQPGGSLRLSCAASGFTFEEEEMIWVRQAPGKGLEWISAISGSGGSTYYADSVKGRFTISRDNSNNTL
YLQMNSLRAEDTAVYYCGREPFRFDYWGQGTLVTVSS (SEQ ID NO: 245)
BMS3h-38-12
EVRLLESGEGLVQPGGSLRLSCAASGFTFEEEEMIWVRQAPGKGLEWVSAISGSGGSTYYADSVKGRFTISRDNSKNTL
YLQMNSLRAEDTAVYYCGKEPFRFDYWGQGTLVTVSS (SEQ ID NO: 246)
BMS3h-38-13
EVQQLESGGGLVQPGGSLRLSCAASGFTFEEEEMIWVRQAPGKGLEWVSAISGSGGSTYYADSVKGRFTISRDNSKNTL
YLQMNSLRAEDTAVYYCGKEPFRFDYWGQGTLVTVSS (SEQ ID NO: 247)
BMS3h-38-201
EVQLLASGGGLVQPGGSLRLSCAASGFTFEEEEMIWVRQAPGKGLEWVSAISGSGGSTYYADSVKGRFTISRDNSKNTL
YLQMNSLRAEDTAVYYCGKEPFYYDYWGQGTLVTVSS (SEQ ID NO: 248)
BMS3h-38-202
EVQLLASGGGLVQPGGSLRLSCAASGFTFEEEEMIWVRQAPGKGLEWVSAISGSGGSTYYADSVKGRFTISRDNSKNTL
YLQMNSLRAEDTAVYYCGKEPFYFDYWGQGTLVTVSS (SEQ ID NO: 249)
BMS3h-38-203
EVQLLASGGGLVQPGGSLRLSCAASGFTFEEKEMIWVRQAPGKGLEWVSAISGSGGSTYYADSVKGRFTISRDNSKNTL
YLQMNSLRAEDTAVYYCGKEPFFYDYWGQGTLVTVSS (SEQ ID NO: 250)
BMS3h-38-204
EVQLLASGGGLVQPGGSLRLSCAASGFTFPQEEMIWVRQAPGKGLEWVSAISGSGGSTYYADSVKGRFTISRDNSKNTL
YLQMNSLRAEDTAVYYCGKEPFRYDYWGQGTLVTVSS (SEQ ID NO: 251)
BMS3h-38-205
EVQLLASGGGLVQPGGSLRLSCAASGFTFFAAEMIWVRQAPGKGLEWVSAISGSGGSTYYADSVKGRFTISRDNSKNTL
YLQMNSLRAEDTAVYYCGKEPFRYDYWGQGTLVTVSS (SEQ ID NO: 252)
BMS3h-38-206
EVQLLASGGGLVQPGGSLRLSCAASGFTFEEEEMIWVRQAPGKGLEWVSAISRPGTSTYYADSVKGRFTISRDNSKNTL
YLQMNSLRAEDTAVYYCGKEPFRYDYWGQGTLVTVSS (SEQ ID NO: 253)
BMS3h-38-207
EVQLLASGGGLVQPGGSLRLSCAASGFTFEEEEMIWVRQAPGKGLEWVSAISRMGFSTYYADSVKGRFTISRDNSKNTL
YLQMNSLRAEDTAVYYCGKEPFRYDYWGQGTLVTVSS (SEQ ID NO: 254)
BMS3h-38-208
EVQLLASGGGLVQPGGSLRLSCAASGFTFEEEEMIWVRQAPGKGLEWVSAISRWGHSTYYADSVKGRFTISRDNSKNTL
YLQMNSLRAEDTAVYYCGKEPFRYDYWGQGTLVTVSS (SEQ ID NO: 255)
BMS3h-38-209
EVQLLASGGGLVQPGGSLRLSCAASGFTFEEEEMIWVRQAPGKGLEWVSAISRLGWSTYYADSVKGRFTISRDNSKNTL
YLQMNSLRAEDTAVYYCGKEPFRYDYWGQGTLVTVSS (SEQ ID NO: 256)
BMS3h-38-210
EVQLLASGGGLVQPGGSLRLSCAASGFTFEEEEMIWVRQAPGKGLEWVSAISRWGASTYYADSVKGRFTISRDNSKNTL
YLQMNSLRAEDTAVYYCGKEPFRYDYWGQGTLVTVSS (SEQ ID NO: 257)
BMS3h-38-211
EVQLLASGGGLVQPGGSLRLSCAASGFTFEEEEMIWVRQAPGKGLEWVSAISRQGGSTYYADSVKGRFTISRDNSKNTL
YLQMNSLRAEDTAVYYCGKEPFRYDYWGQGTLVTVSS (SEQ ID NO: 258)
BMS3h-38-212
EVQLLASGGGLVQPGGSLRLSCAASGFTFEEEEMIWVRQAPGKGLEWVSAISVSGWSTYYADSVKGRFTISRDNSKNTL
YLQMNSLRAEDTAVYYCGKEPFRYDYWGQGTLVTVSS (SEQ ID NO: 259)
BMS3h-38-213
EVQLLASGGGLVQPGGSLRLSCAASGFTFEEEEMIWVRQAPGKGLEWVSAISRWGWSTYYADSVKGRFTISRDNSKNTL
YLQMNSLRAEDTAVYYCGKEPFRYDYWGQGTLVTVSS (SEQ ID NO: 260)
BMS3h-38-214
EVQLLASGGGLVQPGGSLRLSCAASGFTFEEEEMIWVRQAPGKGLEWVSAISRNGLSTYYADSVKGRFTISRDNSKNTL
YLQMNSLRAEDTAVYYCGKEPFRYDYWGQGTLVTVSS (SEQ ID NO: 261)
BMS3h-38-215
EVQLLASGGGLVQPGGSLRLSCAASGFTFEEEEMIWVRQAPGKGLEWVSAISGLGWSTYYADSVKGRFTISRDNSKNTL
YLQMNSLRAEDTAVYYCGKEPFRYDYWGQGTLVTVSS (SEQ ID NO: 262)
BMS3h-38-216
EVQLLASGGGLVQPGGSLRLSCAASGFTFEEEEMIWVRQAPGKGLEWVSAISALGWSTYYADSVKGRFTISRDNSKNTL
YLQMNSLRAEDTAVYYCGKEPFRYDYWGQGTLVTVSS (SEQ ID NO: 263)
BMS3h-38-217
EVQLLASGGGLVQPGGSLRLSCAASGFTFEEEEMIWVRQAPGKGLEWVSAISRRGYSTYYADSVKGRFTISRDNSKNTL
YLQMNSLRAEDTAVYYCGKEPFRYDYWGQGTLVTVSS (SEQ ID NO: 264)
BMS3h-38-218
EVQLLASGGGLVQPGGSLRLSCAASGFTFEEEEMIWVRQAPGKGLEWVSAISRHGWSTYYADSVKGRFTISRDNSKNTL
YLQMNSLRAEDTAVYYCGKEPFRYDYWGQGTLVTVSS (SEQ ID NO: 265)
BMS3h-38-219
EVQLLASGGGLVQPGGSLRLSCAASGFTFEEEEMIWVRQAPGKGLEWVSSISRSGGSTYYADSVKGRFTISRDNSKNTL
YLQMNSLRAEDTAVYYCGKEPFRYDYWGQGTLVTVSS (SEQ ID NO: 266)
BMS3h-38-220
EVQLLASGGGLVQPGGSLRLSCAASGFTFEEEEMIWVRQAPGKGLEWVSAISRIGNSTYYADSVKGRFTISRDNSKNTL
YLQMNSLRAEDTAVYYCGKEPFRYDYWGQGTLVTVSS (SEQ ID NO: 267)
BMS3h-38-221
EVQLLASGGGLVQPGGSLRLSCAASGFTFEEEEMIWVRQAPGKGLEWVSAISGHGWSTYYADSVKGRFTISRDNSKNTL
YLQMNSLRAEDTAVYYCGKEPFRYDYWGQGTLVTVSS (SEQ ID NO: 268)
BMS3h-38-222
EVQLLASGGGLVQPGGSLRLSCAASGFTFEEEEMIWVRQAPGKGLEWVSAISRWGGSTYYADSVKGRFTISRDNSKNTL
YLQMNSLRAEDTAVYYCGKEPFRYDYWGQGTLVTVSS (SEQ ID NO: 269)
BMS3h-38-223
EVQLLASGGGLVQPGGSLRLSCAASGFTFEEEEMIWVRQAPGKGLEWVSAISGSGGSTYYADSVKGRFTISRDNSKNTL
YLQMNSLRAEDTAVYYCGKEPFMYDYWGQGTLVTVSS (SEQ ID NO: 270)
BMS3h-38-224
EVQLLASGGGLVQPGGSLRLSCAASGFTFEEEEMIWVRQAPGKGLEWVSAISGSGGSTYYADSVKGRFTISRDNSKNTL
YLQMNSLRAEDTAVYYCGKEPFPYDYWGQGTLVTVSS (SEQ ID NO: 271)
BMS3h-38-225
EVQLLASGGGLVQPGGSLRLSCAASGFTFEEEEMIWVRQAPGKGLEWVSAISGSGGGTYYADSVKGRFTISRDNSKNTL
YLQMNSLRAEDTAVYYCGKEPFRYDYWGQGTLVTVSS (SEQ ID NO: 272)
BMS3h-38-226
EVQLLASGGGLVQPGGSLRLSCAASGFTFEEEEMIWVRQAPGKGLEWVSAISGSGGSTYYADSVKGRFTISRDNSKNTL
YLQMNSLRAEDTAVYYCGKEPLYYDYWGQGTLVTVSS (SEQ ID NO: 273)
BMS3h-38-227
EVQLLASGGGLVQPGGSLRLSCAASGFTFEEEEMIWVRQAPGKGLEWVSAISGSGGSTYYADSVKGRFTISRDNSKNTL
YLQMNSLRAEDTAVYYCGKEPMYYDYWGQGTLVTVSS (SEQ ID NO: 274)
BMS3h-38-228
EVQLLASGGGLVQPGGSLRLSCAASGFTFEEEEMIWVRQAPGKGLEWVSAISRNGFSTYYADSVKGRFTISRDNSKNTL
YLQMNSLRAEDTAVYYCGKEPFRYDYWGQGTLVTVSS (SEQ ID NO: 275)
BMS3h-38-229
EVQLLASGGGLVQPGGSLRLSCAASGFTFEEEEMIWVRQAPGKGLEWVSAISRTGGSTYYADSVKGRFTISRDNSKNTL
YLQMNSLRAEDTAVYYCGKEPFRYDYWGQGTLVTVSS (SEQ ID NO: 276)
BMS3h-38-230
EVQLLASGGGLVQPGGSLRLSCAASGFTFEEEEMIWVRQAPGKGLEWVSAISREGGSTYYADSVKGRFTISRDNSKNTL
YLQMNSLRAEDTAVYYCGKEPFRYDYWGQGTLVTVSS (SEQ ID NO: 277)
BMS3h-38-231
EVQLLASGGGLVQPGGSLRLSCAASGFPFEEEEMIWVRQAPGKGLEWVSAISRQGWSTYYADSVKGRFTISRDNSKNTL
YLQMNSLRAEDTAVYYCGKEPFRYDYWGQGTLVTVSS (SEQ ID NO: 278)
BMS3h-38-232
EVQLLASGGGLVQPGGSLRLSCAASGFTFEEEEMIWVRQAPGKGLEWVSAISRGGGSTYYADSVKGRFTISRDNSKNTL
YLQMNSLRAEDTAVYYCGKEPFRYDYWGQGTLVTVSS (SEQ ID NO: 279)
BMS3h-38-233
EVQLLASGGGLVQPGGSLRLSCAASGFTFEEEEMIWVRQAPGKGLEWVSAISRTGYSTYYADSVKGRFTISRDNSKNTL
YLQMNSLRAEDTAVYYCGKEPFRYDYWGQGTLVTVSS (SEQ ID NO: 280)
BMS3h-38-234
EVQLLASGGGLVQPGGSLRLSCAASGFTFEEEEMIWVRQAPGKGLEWVSAISRNGRSTYYADSVKGRFTISRDNSKNTL
YLQMNSLRAEDTAVYYCGKEPFRYDYWGQGTLVTVSS (SEQ ID NO: 281)
BMS3h-38-235
EVQLLASGGGLVQPGGSLRLSCAASGFTFEEEEMIWVRQAPGKGLEWVSAISRNGYSTYYADSVKGRFTISRDNSKNTL
YLQMNSLRAEDTAVYYCGKEPFRYDYWGQGTLVTVSS (SEQ ID NO: 282)
BMS3h-38-236
EVQLLASGGGLVQPGGSLRLSCAASGFTFEEEEMIWVRQAPGKGLEWVSAISRKGSSTYYADSVKGRFTISRDNSKNTL
YLQMNSLRAEDTAVYYCGKEPFRYDYWGQGTLVTVSS (SEQ ID NO: 283)
BMS3h-38-237
EVQLLASGGGLVQPGGSLRLSCAASGFTFEEEEMIWVRQAPGKGLEWVSAISRGGWSTYYADSVKGRFTISRDNSKNTL
YLQMNSLRAEDTAVYYCGKEPFRYDYWGQGTLVTVSS (SEQ ID NO: 284)
BMS3h-38-238
EVQLLASGGGLVQPGGSLRLSCAASGFTFEEEEMIWVRQAPGKGLEWVSAISRSGYSTYYADSVKGRFTISRDNSKNTL
YLQMNSLRAEDTAVYYCGKEPFRYDYWGQGTLVTVSS (SEQ ID NO: 285)
BMS3h-38-239
EVQLLASGGGLVQPGGSLRLSCAASGFTFEEEEMIWVRQAPGKGLEWVSAISRNGMSTYYADSVKGRFTISRDNSKNTL
YLQMNSLRAEDTAVYYCGKEPFRYDYWGQGTLVTVSS (SEQ ID NO: 286)
BMS3h-38-240
EVQLLESGGGLVQPGGSLRLSCAASGFTFEEEEMIWVRQAPGKGLEWVSAISRNGYSTYYADSVKGRFTISRDNSKNTL
YLQMNSLRAEDTAVYYCGKEPFRYDYWGQGTLVTVSS (SEQ ID NO: 287)
BMS3h-41-1
EVQLLESGEGLVQPGGSLRLSCAASGFTFTEHEMIWVRQAPGKGLEWVSSISGNGANTYYADSVKGRFTISRDNSKNTL
YLQMNSLRPEDTAVYYCAKEPLRFDYWGQGTLVTVSS (SEQ ID NO: 288)
BMS3h-41-2
EVQLLESGGGLVQPGGSLRLSCAASGSTFTEYEMIWVRQAPGKGLEWISSISGNGANTYYADSVKGRFTISRDNSKNTL
YLQMNSLRAEDTAVYFCAKEPLRFDYRGQGTLVTVSS (SEQ ID NO: 289)
BMS3h-41-3
EVQLLEPGGGLVQPGGSLRLSCAASGFTFTEYEMIWVRKAPGKGMEWVSSISGNGANTYYADSVKGRFTISRDNSKNML
YLQMNSLRAEDTAVYYCAKEPLRFGYWGQGTLVTVSS (SEQ ID NO: 290)
BMS3h-41-4
EVQLLDSGGGLVQPGGSLRLSCAASGFTFTEYEMIWVRQAPGKGLEWVSSISGNGANTYYADSVKGRFTISRDNSKNTL
YLQMNSLRAEDTAVYYCAKEPLRFDYWGRGTLVTVSS (SEQ ID NO: 291)
BMS3h-41-5
EVQLLGSGGGLVQPGGSLRLSCAASGFTFTEYEMIWVRQAPGKSLEWVSSISGNGANTYYADSVKGRFTISRDNSKNTL
YLQMNSLRAEDTAVYYCAKEPLRYDDWGQGTLVTVSS (SEQ ID NO: 292)
BMS3h-41-6
EVQPLESGGGLVQPGGSLRLSCSASGFTFNEYEMIWVRQAPGKGLEWVSSISGNGANTYYADSVKGRFTISRDNSKNTL
YLQMNSLRAEDTAVYYCAKEPLRFDYWGQGTLVTVSS (SEQ ID NO: 293)
BMS3h-41-7
EVQLLESGEGLVQPGGSLRLSCAASGFTFAEYEMIWVRQAPGKGLEWVSSISGNGANTYYADSVKGRFTISRDNSKNTL
YLQMNSLRAEDTAVYYCAKEPLRFDYWGQGTLVTVSS (SEQ ID NO: 294)
BMS3h-41-8
EVQLLDPGGGLVQPGGSLRLSCAASGFTFTESEMIWVRQAPGKGLEWVSSISGNGANTYYADSVKGRFTISRDNSKNTL
YLQMNSLRAEDTAVYYCAKEPLRFDYWGQGTLVTVSS (SEQ ID NO: 295)
BMS3h-41-9
EVQLLEPGGGLVQPGGSLRLSCAASGFTFTEYEMIWVRKAPGKGMEWVSSISGNGANTYYADSVKGRFTISRDNSKNTL
YLQMNSLRPEDTAVYYCAKEPLRFDDWGQGTLVTVSS (SEQ ID NO: 296)
BMS3h-41-10
EVQLLESGVGLVQPGGSLRLSCAASGFTFTEYEMIWVRKAPGKGLEWVSSISGNGANTYYADSVKGRFTISRDNSKNTL
YLQMNSLRAEDTAVYYCAKEPLRFDNWGQGTLVTVSS (SEQ ID NO: 297)
BMS3h-41-11
EVQLLESRGGLVQPGGSLRLSCAASGFTFTEHEMIWVRQAPGKGLEWVSSISGNGANTYYADSVKGRFSVSRDNSKNTL
YLQMNSLRAEDTAVYYCAKEPLRFDYWGQGTLVTVSS (SEQ ID NO: 298)
BMS3h-41-12
EVQPLESGGGLVQPGGSLRLSCAASGFTFTEYEMIWVRQAPGKGLEWVSSISGNGANTYYADSVKGRFTISRDNSKNTL
YLQMNSLRAEDTAVYYCAKEPLRFDYWGQGTLVTVSS (SEQ ID NO: 299)
BMS3h-41-13
EVQLLESAGGLVQPGGSLRLSCAASGFTFAEYEMIWVRQAPGKGLEWVSSISGNGANTYYADSVKGRFTISRDNSKNTL
YLQMNSLRAEDTAVYYCAKEPLRFDYWGQGALVTVSS (SEQ ID NO: 300)
BMS3h-41-14
EVQLLEPGGGLVQPGGSLRLSCAASGFTFTEYEMIWVRQAPGKGLEWVSSISGNGANTYYADSVKGRFTISRDNSKNTL
YLQMNSLRAEDTAVYYCAKEPLRFDNWGQGTLVTVSS (SEQ ID NO: 301)
BMS3h-43-1
EVQLLESGGGLVQPGGSLRLSCTASGFTFNMYEMSWVRQAPGKGLEWVSGISRRGFTTYYADSVKGRFTISRDNSKNTL
YLQMNSLRAEDTAVYYCAKEPITYDLRYARFDYSGQGTLVTVSS (SEQ ID NO: 302)
BMS3h-43-2
EEQLLESGGGLVQPGGSLRLSCTASGFTFNMYEMSWVRQAPGKGLEWVSGISRRGFTTYYADSVKGRFTISRDNSKNTL
YLQMNSLRAEDTAVYYCAKEPITYATRYARFDYWGQGTLVTVSS (SEQ ID NO: 303)
BMS3h-43-3
EVQLLESGGGLVQPGGSLRLSCTASGFTFNMYEMSWVRQAPGKGLEWVSGISRRGFTTYYADSVKGRFTISRDNFKNTL
YLQMNSLRAEDTAVYYCAKEPITYDMRYARFDYGGQGTLVTVSS (SEQ ID NO: 304)
BMS3h-43-4
EVQLLESGGGLVQPGGSLRLSCTASGFTFNMYEMSWVRQAPGKGLEWVSGISRRGFTTYYADSVKGRFTISRDNSKNTL
YLQMNSLRAEDTAVYYCAKEPITYDMRYARFDNWGQGTLVTVSN (SEQ ID NO: 305)
BMS3h-43-5
EVQLLESGGGLVQPGGSLRLSCTASGFTFNTYEMSWVRQAPGKGLEWVSGIGRRGFTTYYADSVKGRFTISRDNSKNTL
YLQMNSLRAEDTAVYYCAKEPITYDLRYARFDYSGQGTLVTVSS (SEQ ID NO: 306)
BMS3h-43-6
EVQLMESGGGLVQPGGSLRLSCTASGFSFNMYEMSWVRQAPGKGLEWVSGISRRGYTTYYADSVKGRFTISRDNSKNTL
YLQMNSLRAEDTAVYYCAKEPITYDMRYARFDYWGRGTLVTVSS (SEQ ID NO: 307)
BMS3h-43-7
EVQLLESGGGLVQPGGSLRLSCTASGFAFNMYEMSWVRQAPGKGLEWVSGISRHGFTTYYADSVKGRFTVSRDNSKNTL
YLQMNSLRAEDTAVYYCAKEPITYDMRYARSDYWGQGTLVTVSS (SEQ ID NO: 308)
BMS3h-43-8
EVQLLESGGGLVQPGGSLRLSCTASGFTFNMYEMSWVRQAPGKGLEWVSGISRRGFTTYYADSVKGRFTISRDNSKNTL
YLQMNSLRAEDTAVYFCAKEPITYDMRYARSDYWGQGTLVTVSS (SEQ ID NO: 309)
BMS3h-43-9
EVQLLESGGGLVQPGGSLRLSCTASGFTFNIWEMSWVRQAPGKGLEWVSGISRRGFTTYYADSVKGRFTISRDNSKNTL
YLQMNSLRAEDTAVYYCAKEPITYSMRYARFDYSGLGTMVTVSS (SEQ ID NO: 310)
BMS3h-43-10
EVQLLESGGGLVQPGGSLRLSCTASGFTFNMYEMSWVRQAPGKGLEWVSGISRRGFTTYYADSVKGRFTISRDNSKNTL
YLQMNSLRAEDTAVYYCAKEPITYDMRYARFDYSGQGTLVTVSS (SEQ ID NO: 311)
BMS3h-43-11
EVQLLESGGGLVQPGGSLRLSCTASGFTFNMYEMSWVRKAPGKGLEWVSGISRHGFTTYYADSVKGRFTISRDNSKNTL
YLQMNSLRAEDTAVYYCAKEPITYDMRYARFDYWGQGTLVTVSS (SEQ ID NO: 312)
BMS3h-43-12
EVQLFESGGGLVQPGGSLRLSCTASGFTFNMYEMSWVRQAPGKGLEWVSGISRRGFTTYYADSVKGRFTISRDNSKNTL
YLQMNSLRAEDTAVYYCAKEPITYDMRYARFDYWGRGTLVTVSS (SEQ ID NO: 313)
BMS3h-43-13
EVQLLESGGGLVQPGGSLRLSCTASGFTFNMYEMSWVRQAPGKGLEWVSGISRRGFTTYYADSVKGRFTISRDNSKNTL
YLQMNSLRAEDTAVYYCAKEPITYDMRYARFDYWGRGTLVTVSS (SEQ ID NO: 314)
BMS3h-43-14
EVQLLESGGGSVQPGGSLRLSCTASGFSFNMYEMSWVRQAPGKGLEWVSGISRRGFTTYYADSVKGRFTISRDNSKNTL
YLQMNSLRAEDTAVYYCAKEPITYDMRYARFDYWGQGTLVTVSG (SEQ ID NO: 315)
BMS3h-43-15
EVQLLESGGGLVQPGGSLRLSCTASGFTFNMYEMSWVRKAPGKGLEWVSGISRRGFTTYYADSVKGRFTISRDNSKNTL
YLQMNSLRAEDTAVYYCAKEPITYDMRYARFDYWGQGTLVTVSS (SEQ ID NO: 316)
BMS3h-56-1
EVQLLESGGGLVQPGGSLRLSCAASGFTFRDYEMWWVRQAPGKGLERVSAINPQGTRTYYADSVKGRFTISRDNSKNTL
YLQMNSLRAEDTAVYYCAKLPFTFEDWGQGTLVTVSS (SEQ ID NO: 317)
BMS3h-56-2
EVQLLESGGGLVQPGGSLRLSCAASGFTFRDYEMWWVRQAPGKGLERVSAINPQGTRTYYADSVKGRFTISRDNSKNTL
YLQMNSLRAEDTAVYYCAKLPFTFDDWGQGTLVTVSS (SEQ ID NO: 318)
BMS3h-56-3
EVQLLESGGGLVQPGGSLRLSCAASGFTFRDYEMWWVRQAPGKGLERVSAINPQGTRTYYADSVKGRFTISRDNSKNTL
YLQMNSLRAEDTAVYYCTKLPFIFEYWGQGTLVTVSS (SEQ ID NO: 319)
BMS3h-56-4
EVQLLESGGGLVQPGGSLRLSCAASGFTFRDYEMWWVRQAPGKGLERVSAINPQGTRTYYADSVKGRFTISRDNSKNTL
YLQMNSLRAEDTAVYYCAKLPFMFDDRGQGTLVTVSS (SEQ ID NO: 320)
BMS3h-56-5
EVQLLESGGGLVQPGGSLRLSCAASGFTFRDYEMWWVRQAPGKGLERVSAINPQGTRTYYADSVMGRFTISRDNSKNTL
YLQMNSLRAEDTAVYYCAKLPFTFDDWGQGTLVTVSS (SEQ ID NO: 321)
BMS3h-56-6
EVQLLESGGGLVQPGGSLRLSCAASGFSFRDYEMWWYRQAPGKGLERVSAINPQGTRTYYADSVKGRFTISRDNSKNTL
YLQMNSLRAEDTAVYYCAKLPFIFDNRGQGTLVTVSS (SEQ ID NO: 322)
BMS3h-56-7
EVQLLESGGGLVQPGGSLRLSCAASGFTFRDYEMWWVRQAPGKGLERVSAINPQGTRTYYADSVKGRFTISRDNSKNTL
YLQMNSLRAEDTSVYHCAKPPFIFGDWGPGTLVTVSS (SEQ ID NO: 323)
BMS3h-56-8
EVQLLESGGGLVQPGGSRRLSCAASGFTFRDYEMWWVRQAPGKGLERVSAINPQGTRTYYADSVKGRFTISRDNSKNTL
YLQMNSLRAEDTAVYYCAKLPFTFEDWGQGTLVTVSS (SEQ ID NO: 324)
BMS3h-56-9
EVQLLESGGGLVQPGGSLRLSCAASGFTFRDYEMWWVRQAPGKGLERVSAINPQGTRTYYADSVMGRFTISRDNSKNTL
YLQMNSLRAEDTAVYYCAKLPFMFDDRGQGTLVTVSS (SEQ ID NO: 325)
BMS3h-56-10
EVQLLESGGGLVQPGGSLRLSCAASGFTFRDYEMWWVRQAPGKVLERVSAINPQGTRTYYADSVKGRFTISRDNSKNML
YLQMNSLRAEDTAVYYCAKLPFMFDDRGQGTLVTVSS (SEQ ID NO: 326)
BMS3h-56-11
EVQLLESGGGLVQPGGSLRLSCAASGFTFRDYEMWWVRQAPGKGLERVSAINPQGTRTYYADSVKGRFTISRDNSKNTL
YLQMNSLRAEDTAVYYCAKLPFMFDDRGQGTLVTVSS (SEQ ID NO: 327)
BMS3h-56-12
EVQLLESGGGLIQPGGSLRLSCAASGFTFRDYEMWWVRQAPGKGLERVSAINPQGTRTYYADSVKGRFTISRDNSKNTL
YLQMNSLRAEDTAVYYCLKLPFIFDYWGQGTLVTVSS (SEQ ID NO: 328)
BMS3h-56-13
EVQLLESGGGLVQPGGSLRLSCAASGFTFRDYEMWWVRQAPGKGLERVSAINPQGTRTYYADSVKGRFTISRDNSKNTL
YLQMNSLRADDTAVYHCTKLPFIFDYWGQGTLVTVSS (SEQ ID NO: 329)
BMS3h-56-14
EVQLLESGGGLVQPGGSLRLSCAASGFTFRDYEMWWVRQAPGMVLERVSAINPQGTRTYYADSVKGRFTISRDNSKNTL
YLQMNSLRAEDTAVYYCAKLPFFFDSRGQGTLVTVSS (SEQ ID NO: 330)
BMS3h-56-15
EVQLLESGGGLVQPGGSLRLSCAASGFTFRDYEMWWVRRAPGKGLERVSAINPQGTRTYYADSVKGRFTISRDNSKNTL
YLQMNSLRAEDTAVYYCAKLPFTFEDWGQGTLVTVSS (SEQ ID NO: 331)
BMS3h-56-16
EVQLLESGGGLVQPGGSLRLSCAASGFTFRDYEMWWVRQAPGKGLERVSAINPQGTRTYYADSVMGRFTISRDNSKNTL
YLQMNSLRAEDTAVYYCAKLPFTFEDWGQGTLVTVSS (SEQ ID NO: 332)
BMS3h-56-17
EVQLLESGGGLVQPGGSLRLSCAASGFSFRDYEMWWYRQAPGKGLERVSAINPQGTRTYYADSVKGRFTISRDNSKNTL
YLQMNSLRAEDTAVYYCAKLPFTFEDWGQGTLVTVSS (SEQ ID NO: 333)
BMS3h-56-18
EVQLLESGGGLVQPGGSLRLSCAASGFTFRDYEMWWVRQAPGKVLERVSAINPQGTRTYYADSVKGRFTISRDNSKNML
YLQMNSLRAEDTAVYYCAKLPFTFEDWGQGTLVTVSS (SEQ ID NO: 334)
BMS3h-56-19
EVQLLESGGGLVQPGGSLRLSCAASGFTFRDYEMWWVRQAPGKGLERVSAINPQGTRTYYADSVKGRFTISRDNSKNTL
YLQMNSLRAEDTAVYHCAKLPFTFEDWGQGTLVTVSS (SEQ ID NO: 335)
BMS3h-56-20
EVQLLESGGGLVQPGGSLRLSCAASGFTFRDYEMWWVRQAPGKGLERVSAINPQGTRTYYADSVKGRFTISRDNSKNTL
YLQMNSLRAEDTAVYYCTKLPFTFEDWGQGTLVTVSS (SEQ ID NO: 336)
BMS3h-56-21
EVQLLESGGGLVQPGGSLRLSCAASGFTFRDYEMWWVRQAPGKGLERVSAINPQGTRTYYADSVKGRFTISRDNSKNTL
YLQMNSLRAEDTAVYYCLKLPFTFEDWGQGTLVTVSS (SEQ ID NO: 337)
BMS3h-56-22
EVQLLESGGGLVQPGGSLRLSCAASGFTFRDYEMWWVRQAPGKGLERVSAINPQGTRTYYADSVKGRFTISRDNSKNTL
YLQMNSLRADDTAVYHCTKLPFIFEYWGQGTLVTVSS (SEQ ID NO: 338)
BMS3h-56-23
EVQLLESGGGLVQPGGSLRLSCAASGFTFRDYEMWWVRQAPGKGLERVSAINPQGTRTYYADSVMGRFTISRDNSKNTL
YLQMNSLRAEDTAVYYCAKEPYSFDSWGQGTLVTVSS (SEQ ID NO: 339)
BMS3h-56-24
EVQLLESGGGLVQPGGSLRLSCAASGFTFRDYEMWWVRQAPGKGLERVSAINPQGTRTYYADSVMGRFTISRDNSKNTL
YLQMNSLRAEDTAVYHCAKEPYSYDYWGQGTLVTVSS (SEQ ID NO: 340)
BMS3h-56-25
EVQLLESGGGLVQPGGSLRLSCAASGFTFRDYEMWWVRRAPGKGLERVSAINPQGTRTYYADSVMGRFTISRDNSKNTL
YLQMNSLRAEDTAVYYCAKLPFTFDDWGQGTLVTVSS (SEQ ID NO: 341)
BMS3h-56-26
EVQLLESGGGLVQPGGSLRLSCAASGFTFRDYEMWWVRRAPGKGLERVSAINPQGTRTYYADSVMGRFTISRDNSKNTL
YLQMNSLRAEDTAVYYCAKLPFMFDDRGQGTLVTVSS (SEQ ID NO: 342)
BMS3h-56-27
EVQLLESGGGLVQPGGSLRLSCAASGFTFRDYEMWWVRQAPGKGLERVSAINPQGTRTYYADSVMGRFTISRDNSKNTL
YLQMNSLRAEDTAVYYCAKLPFMFDDWGQGTLVTVSS (SEQ ID NO: 343)
BMS3h-56-28
EVQLLESGGGLVQPGGSLRLSCAASGFTFAGYELWWVRQAPGKGLERVSAINPQGTRTYYADSVMGRFTISRDNSKNTL
YLQMNSLRAEDTAVYYCAKLPFTFDDWGQGTLVTVSS (SEQ ID NO: 344)
BMS3h-56-29
EVQLLESGGGLVQPGGSLRLSCAASGFTFAGYELWWVRQAPGKGLERVSAINPQGTRTYYADSVMGRFTISRDNSKNTL
YLQMNSLRAEDTAVYYCAKLPFMFDDRGQGTLVTVSS (SEQ ID NO: 345)
BMS3h-56-30
EVQLLESGGGLVQPGGSLRLSCAASGFTFAGYEMWWFRQAPGKGLERVSAINPQGTRTYYADSVMGRFTISRDNSKNTL
YLQMNSLRAEDTAVYYCAKLPFTFDDWGQGTLVTVSS (SEQ ID NO: 346)
BMS3h-56-31
EVQLLESGGGLVQPGGSLRLSCAASGFTFAGYEMWWFRQAPGKGLERVSAINPQGTRTYYADSVMGRFTISRDNSKNTL
YLQMNSLRAEDTAVYYCAKLPFMFDDRGQGTLVTVSS (SEQ ID NO: 347)
BMS3h-56-32
EVQLLESGGGLVQPGGSLRLSCAASGFTFRDYEMWWVRQAPGKGLEWVSAINPQGTRTYYADSVMGRFTISRDNSKNTL
YLQMNSLRAEDTAVYYCAKLPFTFDDWGQGTLVTVSS (SEQ ID NO: 348)
BMS3h-56-33
EVQLLESGGGLVQPGGSLRLSCAASGFTFRDYEMWWVRQAPGKGLEWVSAINPQGTRTYYADSVMGRFTISRDNSKNTL
YLQMNSLRAEDTAVYYCAKLPFMFDDRGQGTLVTVSS (SEQ ID NO: 349)
BMS3h-56-202
EVQLLESGGGLVQPGGSLRLSCAASGFTFRDYEMWWVRQAPGKGLERVSAINPQGTRTYYADSVKGRFTISRDNSKNTL
YLQMNSLRAEDTAVYYCAKLPTYFSDRGQGTLVTVSS (SEQ ID NO: 350)
BMS3h-56-203
EVQLLESGGGLVQPGGSLRLSCAASGFTFRDYEMWWVRQAPGKGLERVSAINPQGTRTYYADSVKGRFTISRDNSKNTL
YLQMNSLRAEDTAVYYCAKLPFFFEEWGQGTLVTVSS (SEQ ID NO: 351)
BMS3h-56-204
EVQLLESGGGLVQPGGSLRLSCAASGFTFRDYEMWWVRQAPGKGLERVSAINPQGTRTYYADSVKGRFTISRDNSKNTL
YLQMNSLRAEDTAVYYCAKLPTYFKDWGQGTLVTVSS (SEQ ID NO: 352)
BMS3h-56-205
EVQLLESGGGLVQPGGSLRLSCAASGFTFRDYEMWWVRQAPGKGLERVSAINPQGTRTYYADSVKGRFTISRDNSKNTL
YLQMNSLRAEDTAVYYCAKLPFYFSEWGQGTLVTVSS (SEQ ID NO: 353)
BMS3h-56-206
EVQLLESGGGLVQPGGSLRLSCAASGFTFRDYEMWWVRQAPGKGLERVSAINPQGTRTYYADSVKGRFTISRDNSKNTL
YLQMNSLRAEDTAVYHCAKLPMFFEDWGQGTLVTVSN (SEQ ID NO: 354)
BMS3h-56-207
EVQLLESGGGLVQPGGSLRLSCAASGFTFRDYEMWWVRQAPGKGLERVSAINPQGTRTYYADSVKGRFTISRDNSKNTL
YLQMNSLRAEDTAVYYCAKLPFPFSEWGQGTLVTVSS (SEQ ID NO: 355)
BMS3h-56-208
EVQLLESGGGLVQPGGSLRLSCAASGFTFRDYEMWWVRQAPGKGLERVSAINPQGTRTYYADSVKGRFTISRDNSKNTL
YLQMDSLRAEDTAVYYCAKLPFYFSEWGQGTLVTVSS (SEQ ID NO: 356)
BMS3h-56-209
EVQLLESGGGLVQPGGSLRLSCAASGFTFRDYEMWWVRQAPGKGLERVSAINPYGNLTYYADSVKGRFTISRDNSKNTL
YLQMNSLRAEDTAVYYCAKLPFTFEDWGQGTLVTVSS (SEQ ID NO: 357)
BMS3h-56-210
EVQLLESGGGLVQPGGSLRLSCAASGFTFRDYEMWWVRQAPGKGLERVSAINPPGTLTYYADSVKGRFTISRDNSKNTL
YLQMNSLRAEDTAVYYCAKLPFTFEDRGQGTLVTVSS (SEQ ID NO: 358)
BMS3h-56-211
EVQLLESGGGLVQPGGSLRLSCAASGFTFRDYEMWWVRQAPGKGLERVSAINPWGGLTYYADSVKGRFTISRDNSKNTL
YLQMNSLRAEDTAVYYCAKLPFTFEDWGQGTLVTVSS (SEQ ID NO: 359)
BMS3h-56-212
EVQLLESGGGLVQPGGSLRLSCAASGFTFRDYEMWWVRQAPGKGLERVSAINPMGGFTYYADSVKGRFTISRDNSKNTL
YLQMNSLRAEDTAVYYCAKLPFTFEDWGQGTLVTVSS (SEQ ID NO: 360)
BMS3h-56-213
EVQLLESGGGLVQPGGSLRLSCAASGFTFRDYEMWWVRQAPGKGLERVSAINPWGSHTYYADSVKGRFTISRDNSKNTL
YLQMNSLRAEDTAVYYCAKLPFTFEDWGQGTLVTVSS (SEQ ID NO: 361)
BMS3h-56-214
EVQLLESGGGLVQPGGSLRLSCAASGFTFRDYEMWWVRQAPGKGLERVSAINPSGGLTYYADSVKGRFTISRDNSKNTL
YLQMNSLRAEDTAVYYCAKLPFTFDDRGQGTLVTVSS (SEQ ID NO: 362)
BMS3h-56-215
EVQLLESGGGLVQPGGSLRLSCAASGFTFRDYEMWWVRQAPGKGLERVSAINPHGSLTYYADSVKGRFTISRDNSKNTL
YLQMNSLRAEDTAVYYCAKLPFTFDDWGQGTLVTVSS (SEQ ID NO: 363)
BMS3h-56-216
EVQLLESGGGLVQPGGSLRLSCAASGFTFRDYEMWWVRQAPGKGLERVSAINPAGRLTYYADSVKGRFTISRDNSKNTL
YLQMNSLRAEDTAVYYCAKLPFTFEDWGQGTLVTVSS (SEQ ID NO: 364)
BMS3h-56-217
EVQLLESGGGLVQPGGSLRLSCAASGFTFRDYEMWWVRQAPGKGLERVSAINPWGSLTYYADSVKGRFTISRDNSKNTL
YLQMNSLRAEDTAVYYCAKLPFTFEDWGQGTLVTVSS (SEQ ID NO: 365)
BMS3h-56-218
EVQLLESGGGLVQPGGSLRLSCAASGFTFPDYEMWWVRQAPGKGLERVSAINPQGTRTYYADSVKGRFTISRDNSKNTL
YLQMNSLRAEDTAVYHCAKLPFTFDDWGQGTLVTVSS (SEQ ID NO: 366)
BMS3h-56-219
EVQLLESGGGLVQPGGSLRLSCADSGFTFPPVEMWWVRQAPGKGLERVSAINPQGTRTYYADSVKGRFTISRDNSKNTL
YLQMNSLRAEDTAVYYCAKLPFTFEDWGQGTLVTVSS (SEQ ID NO: 367)
BMS3h-56-220
EVQLLESGGGLVQPGGSLRLSCAASGFTFRDYEMWWVRQAPGKGLERVSAINPYGGLTYYADSVKGRFTISRDNSKNTL
YLQMNSLRAEDTAVYYCAKLPFTFDDWGQGTLVTVSS (SEQ ID NO: 368)
BMS3h-56-221
EVQLLESGGGLVQPGGSLRLSCAASGFTFRDYEMWWVRQAPGKGLERVSAINPWGNHTYYADSVKGRFTISRDNSKNTL
YLQMNSLRAEDTAVYYCAKLPFTFEDWGQGTLVTVSS (SEQ ID NO: 369)
BMS3h-56-222
EVQLLESGGGLVQPGGSLRLSCAASGFTFRDYEMWWVRQAPGKGLERVSAINPHGGYTYYADSVKGRFTISRDNSKNTL
YLQMNSLRAEDTAVYYCAKLPFTFEDWGQGTLVTVSS (SEQ ID NO: 370)
BMS3h-56-223
EVQLLESGGGLVQPGGSLRLSCAASGFTFRDYEMWWVRQAPGRGLERVSAINPPGMLTYYADSVKGRFTISRDNSKNTL
YLQMNSLRAEDTAVYYCAKLPFTFDDWGQGTLVTVSS (SEQ ID NO: 371)
BMS3h-56-224
EVQLLESGGGLVQPGGSLRLSCAASGFTFRDYEMWWVRQAPGKGLERVSAINPWGQLTYYADSVKGRFTISRDNSKNTL
YLQMNSLRAEDTAVYYCAKLPFTFEDWGQGTLVTVSS (SEQ ID NO: 372)
BMS3h-56-225
EVQLLESGGGLVQPGGSLRLSCAASGFTFRDYEMWWVRQAPGKGLERVSAINPWGGYTYYADSVKGRFTISRDNSKNTL
YLQMNSLRAEDTAVYYCAKLPFTFDDWGQGTLVTVSS (SEQ ID NO: 373)
BMS3h-56-226
EVQLLESGGGLVQPGGSLRLSCAASGFTFRDYEMWWVRQAPGKGLERVSAINPSGGLTYYADSVKGRFTISRDNSKNTL
YLQMNSLRAEDTAVYYCAKLPFTFEDWGQGTLVTVSS (SEQ ID NO: 374)
BMS3h-56-227
EVQLLESGGGLVQPGGSLRLSCAASGFTFRDYEMWWVRQAPGKGLERVSAINPSGGLTYYADSVKGRFTISRDNSKNTL
YLQMNSLRAEDTAVYYCAKLPFTFDDWGQGTLVTVSS (SEQ ID NO: 375)
BMS3h-56-228
EVQLLESGGGLVQPGGSLRLSCAASGFTFRDYEMWWVRQAPGKGLERVSAINPSGTLTYYADSVKGRFTISRDNSKNTL
YLQMNSLRAEDTAVYYCAKLPFTFEDWGQGTLVTVSS (SEQ ID NO: 376)
BMS3h-56-229
EVQLLESGGGLVQPGGSLRLSCAASGFTFRDYEMWWVRQAPGKGLERVSAINPYGSLTYYADSVKGRFTISRDNSKNTL
YLQMNSLRAEDTAVYYCAKLPFTFDDWGQGTLVTVSS (SEQ ID NO: 377)
BMS3h-56-230
EVQLLESGGGLVQPGGSLRLSCAASGFTFRDYEMWWVRQAPGKGLERVSAINPWGGYTYYADSVKGRFTISRDNSKNTL
YLQMNSLRAEDTAVYYCAKLPFTFEDWGQGTLVTVSS (SEQ ID NO: 378)
BMS3h-56-231
EVQLLESGGGLVQPGGSLRLSCAASGFTFRDYEMWWVRQAPGKGLERVSAINPQGGLTYYADSVKGRFTISRDNSKNTL
YLQMNSLRAEDTAVYYCAKLPFTFEDWGQGTLVTVSS (SEQ ID NO: 379)
BMS3h-56-232
EVQLLESGGGLVQPGGSLRLSCAASGFTFRDYEMWWVRQAPGKGLERVSAINPWGSHTYYADSVKGRFTISRDNSKNTL
YLQMNSLRAEDTAVYYCAKLPFTFDDWGQGTLVTVSS (SEQ ID NO: 380)
BMS3h-56-233
EVQLLESGGGLVQPGGSLRLSCAASGFTFRDYEMWWVRQAPGKGLERVSAINPWGTLTYYADSVKGRFTISRDNSRNTL
YLQMNSLRAEDTAVYYCAKLPFTFDDWGQGTLVTVSS (SEQ ID NO: 381)
BMS3h-56-234
EVQLLESGGGLVQPGGSLRLSCAASGFTFRDYEMWWVRQAPGKGLERVSAINPNGRLTYYADSVKGRFTISRDNSKNTL
YLQMNSLRAEDTAVYYCAKLPFTFADWGQGTLVTVSS (SEQ ID NO: 382)
BMS3h-56-235
EVQLLESGGGLVQPGGSLRLSCAASGFTFRDYEMWWVRQAPGKGLERVSAINPWGQLTYYADSVKGRFTISRDNSKNTL
YLQMNSLRAEDTAVYYCAKLPFTFDDWGQGTLVTVSS (SEQ ID NO: 383)
BMS3h-56-236
EVQLLESGGGLVQPGGSLRLSCAASGFTFRDYEMWWVRQAPGKGLERVSAINPHGGLTYYADSVKGRFTISRDNSKNTL
YLQMNSLRAEDTAVYYCAKLPFTFDDWGQGTLVTVSS (SEQ ID NO: 384)
BMS3h-56-237
EVQLLESGGGLVQPGGSLRLSCAASGFTFRDYEMWWVRQAPGKGLERVSAINPAGMLTYYADSVKGRFTISRDNSKNTL
YLQMNSLRAEDTAVYYCAKLPFTFDDWGQGTLVTVSS (SEQ ID NO: 385)
BMS3h-56-238
EVQLLESGGGLVQPGGSLRLSCAASGFTFRDYEMWWVRQAPGKGLERVSAINPHGTLTYYADSVKGRFTISRDNSKNTL
YLQMNSLRAEDTAVYYCAKLPFTFEDWGQGTLVTVSS (SEQ ID NO: 386)
BMS3h-56-239
EVQLLESGGGLVQPGGSLRLSCAASGFTFRDYEMWWVRQAPGKGLERVSAINPWGSLTYYADSVKGRFTISRDNSKNTL
YLQMNSLRAEDTAVYYCAKLPFTFDDWGQGTLVTVSS (SEQ ID NO: 387)
BMS3h-56-240
EVQLLESGGGLVQPGGSLRLSCAASGFTFRDYEMWWVRQAPGKGLERVSAINPYGGLTYYADSVKGRFTISRDNSKNTL
YLQMNSLRAEDTAVYYCAKLPFTFEDWGQGTLVTVSS (SEQ ID NO: 388)
BMS3h-56-241
EVQLLESGGGLVQPGGSLRLSCAASGFTFRDYEMWWVRQAPGKGLERVSAINPAGFLTYYADSVKGRFTISRDNSKNTL
YLQMNSLRAEDTAVYYCAKLPFTFEDWGQGTLVTVSS (SEQ ID NO: 389)
BMS3h-56-242
EVQLLESGGGLVRPGGSLRLSCAASGFTFRDYEMWWVRQAPGKGLERVSAINPYGGLTYYADSVKGRFTISRDNSKNTL
YLQMNSLRAEDTAVYYCAKLPFTFEDWGQGTLVTVSS (SEQ ID NO: 390)
BMS3h-56-243
EVQLLESGGGLVQPGGSLRLSCAASGFTFRDYEMWWVRQAPGKGLERVSAINPWGGFTYYADSVKGRFTISRDNSKNTL
YLQMNSLRAEDTAVYYCAKLPFTFEDWGQGTLVTVSS (SEQ ID NO: 391)
BMS3h-56-244
EVQLLESGGGLVQPGGSLRLSCAASGFTFRDYEMWWVRQAPGKGLERVSAINPWGGLTYYADSVKGRFTISRDNSKNTL
YLQMNSLRAEDTAVYYCAKLPFTFDDWGQGTLVTVSS (SEQ ID NO: 392)
BMS3h-56-245
EVQLLESGGGLVQPGGSLRLSCAASGFTFRDYEMWWVRQAPGKGLERVSAINPYGGLTYYADSVKGRFTISRDNSKNTL
YLQMDSLRAEDTAVYYCAKLPFTFEDWGQGTLVTVSS (SEQ ID NO: 393)
BMS3h-56-246
EVQLLESGGGLVQPGGSLRLSCAASGFTFRDYEMWWVRQAPGKGLERVSAINPWGTLTYYADSVKGRFTISRDNSKNTL
YLQMNSLRAEDTAVYYCAKLPFTFEDWGQGTLVTVSS (SEQ ID NO: 394)
BMS3h-56-247
EVQLLESGGGLVQPGGSLRLSCAASGFTFRDYEMWWVRQAPGKGLERVSAINPWGGYTYYADSVKGRFTISRDNSKNTL
YLQMNSLRAEDTAVYYCAKLPFTFEDWGRGTLVTVSS (SEQ ID NO: 395)
BMS3h-56-248
EVQLLESGGGLVQPGGSLRLSCAASGFTFRDYEMWWVRQAPGKGLERVSAINPYGNLTYYADSVKGRFTISRDNSKNTL
YLQMNSLRAEDTAVYYCAKLPFTFDDWGQGTLVTVSS (SEQ ID NO: 396)
BMS3h-56-249
EVQLLESGGGLVQPGGSLRLSCAASGFTFRDYEMWWVRQAPGKGLERVSAINPHGGFTYYADSVKGRFTISRDNSKNTL
YLQMNSLRAEDTAVYYCAKLPFTFEDWGQGTLVTVSS (SEQ ID NO: 397)
BMS3h-56-250
EVQLLESGGGLVQPGGSLRLSCAASGFTFRDYEMWWVRQAPGKGLERVSAINPAGFYTYYADSVKGRFTISRDNSKNTL
YLQMNSLRAEDTAVYYCAKLPFTFDDWGQGTLVTVSS (SEQ ID NO: 398)
BMS3h-56-251
EVQLLESGGGLVQPGGSLRLSCAASGFTFRDYEMWWVRQAPGKGLERVSAINPAGGLTYYADSVKGRFTISRDNSKNTL
YLQMNSLRAEDTAVYYCAKLPFTFDDWGQGTLVTVSS (SEQ ID NO: 399)
BMS3h-56-252
EVQLLESGGGLVQPGGSLRLSCAASGFAFRDYEMWWVRQAPGKGLERVSAINPHGSLTYYADSVKGRFTTSRDNSKNTL
YLQMNSLRAEDTAVYYCAKLPFTFEDWGQGTLVTVSS (SEQ ID NO: 400)
BMS3h-56-253
EVQLLESGGGLVQPGGSLRLSCAASGFTFRDYEMWWVRQAPGKGLERVSAINPAGGYTYYADSVKGRFTISRDNSKNTL
YLQMNSLRAEDTAVYHCAKLPFTFEDWGQGTLVTVSS (SEQ ID NO: 401)
BMS3h-56-254
EVQLLESGGGLVQPGGSLRLSCAASGFTFRDYEMWWVRQAPGKGLERVSAINPQGTRTYYADSVKGRFTISRDNSKNTL
YLQMNSLRAEDTAVYYCAKLPFWFTEWGQGTLVTVSS (SEQ ID NO: 402)
BMS3h-56-255
EVQLLESGGGLVQPGGSLRLSCAASGFTFRDYEMWWVRQAPGKGLERVSAINPQGTRTYYADSVKGRFTISRDNSKNTL
YLQMNSLRAEDTAVYYCAKLPFMFSDRGQGTLVTVSS (SEQ ID NO: 403)
BMS3h-56-256
EVQLLESGGGLVQPGGSLRLSCAASGFTFRDYEMWWVRQAPGKGLERVSAINPQGTRTYYADSVKGRFTISRDNSKNTL
YLQMNSLRAEDTAVYYCAKLPFLFQEWGQGTLVTVSS (SEQ ID NO: 404)
BMS3h-56-257
EVQLLESGGGLVQPGGSLRLSCAASGFTFRDYEMWWVRQAPGKGLERVSAINPQGTRTYYADSVKGRFTISRDNSKNTL
YLQMNSLRAEDTAVYYCAKLPTRFEDWGQGTLVTVSS (SEQ ID NO: 405)
BMS3h-56-258
EVQLLESGGGLVQPGGSLRLSCAASGFTFRDYEMWWVRQAPGKGLERVSAINPQGTRTYYADSVKGRFTISRDNSKNTL
YLQMNSLRAEDTAVYYCAKLPFYFHEWGQGTLVTVSS (SEQ ID NO: 406)
BMS3h-56-259
EVQLLESGGGLVQPGGSLRLSCAASGFTFRDYEMWWVRQAPGKGLERVSAINPQGTRTYYADSVKGRFTISRDNSKNTL
YLQMNSLRAEDTAVYYCGKEPFRYDYWGQGTLVTVSS (SEQ ID NO: 407)
BMS3h-56-260
EVQLLESGGGLVQPGGSLRLSCAASGFTFRDYEMWWVRQAPGKGLERVSAINPQGTRTYYADSVKGRFTISRDNSKNTL
YLQMNSLRAEDTAVYYCAKLPTFFKDWGQGTLVTVSS (SEQ ID NO: 408)
BMS3h-56-261
EVQLLESGGGLVQPGGSLRLSCAASGFTFRDYEMWWVRQAPGKGLERVSAINPQGTRTYYADSVKGRFTISRDNSKNTL
YLQMNSLRAEDTAVYYCAKLPFFFQEWGQGTLVTVSS (SEQ ID NO: 409)
BMS3h-56-262
EVQLLESGGGLVQPGGSLRLSCAASGFTFRDYEMWWVRQAPGKGLERVSAINPQGTRTYYADSVKGRFTISRDNSKNTL
YLQMNSLRAEDTAVYYCAKLPQLFHDRGQGTLVTVSS (SEQ ID NO: 410)
BMS3h-56-263
EVQLLESGGGLVQPGGSLRLSCAASGFTFRDYEMWWVRQAPGKGLERVSAINPQGTRTYYADSVKGRFTISRDNSKNTL
YLQMNSLRAEDTAVYYCAKLPQLFEDWGQGTLVTVSS (SEQ ID NO: 411)
BMS3h-56-264
EVQLLESGGGLVQPGGSLRLSCAASGFTFRDYEMWWVRQAPGKGLERVSAINPQGTRTYYADSVKGRFTISRDNSKNTL
YLQMNSLRAEDTAVYHCAKLPFGFSEWGQGTLVTVSS (SEQ ID NO: 412)
BMS3h-56-265
EVQLLESGGGLVQPGGSLRLSCAASGFTFRDYEMWWVRQAPGKGLERVSAINPQGTRTYYADSVKGRFTISRDNSKNTL
YLQMNSLRAEDTAVYYCAKLPQLFQDWGQGTLVTVSS (SEQ ID NO: 413)
BMS3h-56-266
EVQLLESGGGLVQPGGSLRLSCAASGFTFRDYEMWWVRQAPGKGLERVSAINPQGTRTYYADSVKGRFTISRDNSKNTL
YLQMNSLRAEDTAVYYCAKLPFFFHEWGQGTLVTVSS (SEQ ID NO: 414)
BMS3h-56-267
EVQLLESGGGLVQPGGSLRLSCAASGFTFRDYEMWWVRQAPGKGLERVSAINPQGTRTYYADSVKGRFTISRDNSKNTL
YLQMNSLRAEDTAVYYCAKLPHYFKDWGQGTLVTVSS (SEQ ID NO: 415)
BMS3h-56-268
EVQLLESGGGLVQSGGSLRLSCAASGFTFRDYEMWWVRQAPGKGLERVSAINPQGTRTYYADSVKGRFTISRDNSKNTL
YLQMNSLRAEDTAVYYCAKLPFYFEEWGQGTLVTVSS (SEQ ID NO: 416)
BMS3h-56-269
EVQLLESGGGLVQPGGSLRLSCAASGFTFRDYEMWWVRQAPGKGLERVSAINPQGTRTYYADSVKGRFTISRDNSKNTL
YLQMNSLRAEDTAVYYCAKLPFRFSDRGQGTLVTVSS (SEQ ID NO: 417)
BMS3h-56-270
EVQLLESGGGLVQPGGSLRLSCAASGFTFRDYEMWWVRQAPGKGLERVSAINPQGTRTYYADSVKGRFTISRDNSKNTL
YLQMNSLRAEDTAVYYCAKLPTLFQDWGQGTLVTVSS (SEQ ID NO: 418)
BMS3h-56-271
EVQLLESGGGLVQPGGSLRLSCAASGFTFRDYEMWWVRQAPGKGLERVSAINPQGTRTYYADSVKGRFTISRDNSKNTL
YLQMNSLRAEDTAVYYCAKLPFYFSEWGQGTLVTVSN (SEQ ID NO: 419)
BMS3h-56-272
EVQLLESGGGLVQPGGSLRLSCAASGFTFRDYEMWWVRQAPGKGLERVSAINPQGTRTYYADSVKGRFTISRDNSKNTL
YLQMNSLRAEDTAVYYCAKLPFWFQEWGQGTLVTVSS (SEQ ID NO: 420)
BMS3h-56-273
EVQLLESGGGLVQPGGSLRLSCAASGFTFRDYEMWWVRQAPGKGLERVSAINPWGSLTYYADSVKGRFTISRDNSKNTL
YLQMNSLRAEDTAVYYCAKLPFYFQEWGQGTLVTVSS (SEQ ID NO: 421)
BMS3h-56-274
EVQLLESGGGLVQPGGSLRLSCAASGFTFRDYEMWWVRQAPGKGLERVSAINPWGSLTYYADSVKGRFTISRDNSKNTL
YLQMNSLRAEDTAVYHCAKLPMFFEDWGQGTLVTVSN (SEQ ID NO: 422)
BMS3h-56-275
EVQLLESGGGLVQPGGSLRLSCAASGFTFRDYEMWWVRQAPGKGLERVSAINPWGSLTYYADSVKGRFTISRDNSKNTL
YLQMNSLRAEDTAVYYCAKLPFYFHEWGQGTLVTVSS (SEQ ID NO: 423)
BMS3h-56-276
EVQLLESGGGLVQPGGSLRLSCAASGFTFRDYEMWWVRQAPGKGLERVSAINPWGSLTYYADSVKGRFTISRDNSKNTL
YLQMNSLRAEDTAVYYCAKLPFFFQEWGQGTLVTVSS (SEQ ID NO: 424)
BMS3h-56-277
EVQLLESGGGLVQPGGSLRLSCAASGFTFRDYEMWWVRQAPGKGLERVSAINPWGSLTYYADSVKGRFTISRDNSKNTL
YLQMNSLRAEDTAVYYCAKLPFFFHEWGQGTLVTVSS (SEQ ID NO: 425)
BMS3h-56-278
EVQLLESGGGLVQPGGSLRLSCAASGFTFRDYEMWWVRQAPGKGLERVSAINPWGGFTYYADSVKGRFTISRDNSKNTL
YLQMNSLRAEDTAVYYCAKLPFYFQEWGQGTLVTVSS (SEQ ID NO: 426)
BMS3h-56-279
EVQLLESGGGLVQPGGSLRLSCAASGFTFRDYEMWWVRQAPGKGLERVSAINPWGGFTYYADSVKGRFTISRDNSKNTL
YLQMNSLRAEDTAVYHCAKLPMFFEDWGQGTLVTVSN (SEQ ID NO: 427)
BMS3h-56-280
EVQLLESGGGLVQPGGSLRLSCAASGFTFRDYEMWWVRQAPGKGLERVSAINPWGGFTYYADSVKGRFTISRDNSKNTL
YLQMNSLRAEDTAVYYCAKLPFYFHEWGQGTLVTVSS (SEQ ID NO: 428)
BMS3h-56-281
EVQLLESGGGLVQPGGSLRLSCAASGFTFRDYEMWWVRQAPGKGLERVSAINPWGGFTYYADSVKGRFTISRDNSKNTL
YLQMNSLRAEDTAVYYCAKLPFFFQEWGQGTLVTVSS (SEQ ID NO: 429)
BMS3h-56-282
EVQLLESGGGLVQPGGSLRLSCAASGFTFRDYEMWWVRQAPGKGLERVSAINPWGGFTYYADSVKGRFTISRDNSKNTL
YLQMNSLRAEDTAVYYCAKLPFFFHEWGQGTLVTVSS (SEQ ID NO: 430)
BMS3h-56-283
EVQLLESGGGLVQPGGSLRLSCAASGFTFRDYEMWWVRQAPGKGLERVSAINPWGGLTYYADSVKGRFTISRDNSKNTL
YLQMNSLRAEDTAVYYCAKLPFYFQEWGQGTLVTVSS (SEQ ID NO: 431)
BMS3h-56-284
EVQLLESGGGLVQPGGSLRLSCAASGFTFRDYEMWWVRQAPGKGLERVSAINPWGGLTYYADSVKGRFTISRDNSKNTL
YLQMNSLRAEDTAVYHCAKLPMFFEDWGQGTLVTVSN (SEQ ID NO: 432)
BMS3h-56-285
EVQLLESGGGLVQPGGSLRLSCAASGFTFRDYEMWWVRQAPGKGLERVSAINPWGGLTYYADSVKGRFTISRDNSKNTL
YLQMNSLRAEDTAVYYCAKLPFYFHEWGQGTLVTVSS (SEQ ID NO: 433)
BMS3h-56-286
EVQLLESGGGLVQPGGSLRLSCAASGFTFRDYEMWWVRQAPGKGLERVSAINPWGGLTYYADSVKGRFTISRDNSKNTL
YLQMNSLRAEDTAVYYCAKLPFFFQEWGQGTLVTVSS (SEQ ID NO: 434)
BMS3h-56-287
EVQLLESGGGLVQPGGSLRLSCAASGFTFRDYEMWWVRQAPGKGLERVSAINPWGGLTYYADSVKGRFTISRDNSKNTL
YLQMNSLRAEDTAVYYCAKLPFFFHEWGQGTLVTVSS (SEQ ID NO: 435)
BMS3h-56-288
EVQLLESGGGLVQPGGSLRLSCAASGFTFRDYEMWWVRQAPGKGLERVSAINPQGTRTYYADSVKGRFTISRDNSKNTL
YLQMNSLRAEDTAVYHCAKLPMFFEDWGQGTLVTVSS (SEQ ID NO: 436)
BMS3h-106-1
EVQLLETGGGLVQPGGSLRLSCAASGFTFSTYHMQWVRRAPGKGLEWVSMIDADGLGTYYADPVKGRFTISRDNSKNTL
YLQMNSLRAKDTAVYYCARPGPQFGQFDYLGQGTLVTVSS (SEQ ID NO: 437)
BMS3h-106-2
EVQLFESGGGLVQTGGSLRLSCAASGFTFSTYHMQWVRQAPGKGLEWVSMIDADGLGKYYADPVKGRFTISRDNSKNTL
YLQMNSLRAEDTAVYYCVKPGPQFGQYDYWGQGTLVTVSS (SEQ ID NO: 438)
BMS3h-107-1
EVQLLESGGGLVQPGGSLRLSCSASGFTFSGYDMQWVRQAPGKGLEWVSTISASGVYTYYADSVKGRFTISRDNSKNTL
YLQMNSLRAEDTAVYYCAKYPNRFALNSFDYRGRGTLVTVSS (SEQ ID NO: 439)
BMS3h-107-2
EVQLLESGGGLVQPGGSLRLSCAASGFTFSGYDMQWVRQAPGRGLEWVSTISASGVYTYYTDSVKGRFTTSRDNSKNTL
YLQMNSLRAEDTAVYYCTKYPNRFARNNFDYWGQGTLVTVSS (SEQ ID NO: 440)
BMS3h-131-1
DILMTQSPSSLSASVGDRVTITCRANSSILWALAWYQQKPGEAPKLLIESSSGLQSGVPSRFSGSGSGTDFTLTISSLQ
PEDFATYYCVQNAVWPGTFSQGTKVEIKR (SEQ ID NO: 441)
BMS3h-131-2
DIQMTQSPSSLSASVGDRVTITCRADSSILWALAWYQQKPGKAPKLLIESSSGLQSGVPSRFSGSGSGTDFTLTISSLQ
PEDFATYYCVQNAVWPGTFGQGTKVEIKR (SEQ ID NO: 442)
BMS3h-131-3
DIQMTVSPSSLSASVGDRVTITCRADSSILWALAWYQQKPGKAPKLLIESSSGLQSGVPSRFSGSGSGTDFTLTISSLQ
PEDFATYYCVQNAVWPGTFGQGTKVEIKR (SEQ ID NO: 443)
BMS3h-131-4
DIQMTQSPSSLSASVGDRVTITCRANSSILWALAWYQQKPGKAPKLLIESSSGLQSGVPSRFSGSGSGTDFTLTISSLQ
PEDFATYYCVQNAVWPGTFDQGTKVEIKR (SEQ ID NO: 444)
BMS3h-131-5
DIQMTQSPSSLSASVGDRVTITCRANSSILWALAWYQQKPGKAPKLLIESSTGLQSGVPSRFSGSGSGTDFTLTISSLQ
PEDFATYYCVQNAVWPGTFGQGTKVEIKR (SEQ ID NO: 445)
BMS3h-131-6
DIQMTVSPSSLSASVGDRVTITCRANSSILWALAWYQQKPGKAPKLLIESSSGLQSGVPSRFSGSGSGTDFTLTISSLQ
PEDFATYYCVQNAVWPGTFGQGTKVEIKR (SEQ ID NO: 446)
BMS3h-131-7
DIQMTQSPSSLSASVGDRVTITCRADSSILWALAWYQQKPGKAPKLLIESSSGLQSGVPSRFSGSGSGTDFTLTISSLQ
PEDFATYYCVQNAVWPGTFDQGTKVEIKR (SEQ ID NO: 447)
BMS3h-131-8
DIQMTQSPSSLSASVGDRVTITCRANSSILWALAWYQQKPGKAPELLIESSSGLQSGVPSRFSGSGSGTDFTLTISSLQ
PEDFATYYCVQNAVWPGTFGQGTKVEIKR (SEQ ID NO: 448)
BMS3h-131-9
DIQMTQSPSSLSASVGDRVTITCRANSSILWALAWYQQKPGKAPKLLIESSSGLQSGVPSRFSGSGSGTDFTLTISSLQ
PEDFATYYCVQNAVWPGTFGQGTKVENKR (SEQ ID NO: 449)
BMS3h-131-10
DIQMTQSPSSLSASVGDRVTITCRANSSILWALAWYQQKPGKAPKLLIESSSGLQSGVPSRFSGSGSGTDFTLTISSLQ
PEDFATYYCVQNAVWPGTFGQGTKVEIKR (SEQ ID NO: 450)
BMS3h-131-11
DIQMTQSPSSLSASVGDRVTITCRANSSILWALAWYQQKPGKAPKLLIESSSGLQSGIPSRFSGSGSGTDFTLTISSLQ
PEDFATYYCVQNAVWPGTFGQGTKVEIKR (SEQ ID NO: 451)
BMS3h-131-12
DIQMTQSPSSLSASVGDRVTITCRANSSILWALAWYQQKPGKAPKLLIESSSGLQSGVPSRFSGSGSGTDFTLTISSLQ
PEDFATYYCVQNAVWPGTFGQGTKVEIKR (SEQ ID NO: 452)
BMS3h-131-13
DILLTQSPSSLSASVGDRVTITCRANSSILWALAWYQQKPGKAPKLLIESSSGLQSGVPSRFSGSGSGTDFTLTISSLQ
PEDFATYYCVQNAVWPGTFGQGTKVEIKR (SEQ ID NO: 453)
BMS3h-131-14
DIQMTQSPSSLSASVGDRVTITCRANSSILWALAWYQQKPGKAPKLLIESSSGLQSGVPSRFSGSGTGTDFTLTISGLQ
PEDFATYYCVQNAVWPGTFDQGTKVEIKR (SEQ ID NO: 454)
BMS3h-131-15
DIQMTQSPSSLSASVGDRVTIPCRANSSILWALAWYQQKPGKAPKLLIESSSGLQSGVPSRFSGSASGTDFTLTISSLQ
PEDFATYYCVQNAVWPGTFGQGTKVEIKR (SEQ ID NO: 455)
BMS3h-193-1
DIQMAQSPSSLSASVGDRVTITCRASQTIERRLNWYQQKPGKAPKLLIYLASRLQSGVPSRFSGSGSGTDFTLTISSLQ
PEDFATYYCHQYASPPLTLGQGTKVEIKR (SEQ ID NO: 456)
BMS3h-193-2
DIQMTQSPSSLSASVGDSVTITCRASQTIERRLNWYQQKPGEAPKLLIYLASRLQSGVPSRFSGSGSGTDFTLTISSLQ
PEDFATYYCHQYASPPLTFGQGTNVEIKR (SEQ ID NO: 457)
BMS3h-193-3
DIQMTQSPSSLSASVGDRVTITCRASQTIERRLNWYQQKPGKAPKLLIYLASRLQSGVPSRFSGSGSGTDFTLTISSLQ
PEDFAAYYCHQYESPPLTFGQGTKVEIKR (SEQ ID NO: 458)
BMS3h-193-4
DIQMTQSPSSLSASVGDRVTITCRASRTIERRLNWYQQKPGKAPKLLIYLASRLQSGVPSRFSGSGSGTDFTLTISSLQ
PEDFATYYCHQYESPPLTFGQGTKVEIKR (SEQ ID NO: 459)
BMS3h-193-5
DIQMTQSPSSLSASVGERVTITCRASQTIERRLNWYQQKPGKAPKLLIYLASRLQSGVPSRFSGSGSGTDFTLTISNLQ
PEDSATYYCHQYASPPLTLGQGTKVEIKR (SEQ ID NO: 460)
BMS3h-193-6
DIQMTQSPSSLSASVGDRVTITCRASQTIERRLNWYQQKPGKAPKLLIYLASRLQSGVPSRFSGSGSGTDFTLTISSLQ
PEDFATYYCHQYASPPLTLGQGTKVEIKR (SEQ ID NO: 461)
BMS3h-193-7
DIQITQSPSSLSASVGDRVTITCRASQTIERRLNWYQQKPGKDPKLLIYLASRLQSGVPSRFSGSGSGTDFTLTISSLQ
PEDFATYYCHQYESPPLTFGQGTKVEIKR (SEQ ID NO: 462)
BMS3h-193-8
DIQMTQSPSSLSASVGDRVTITCRASQTIERRLNWYQQKPGEAPKLLIYLASRLQSGVPSRFSGSGSGTDFTLTISSLQ
PEDFATYYCHQYESPPLTFGQGTKVEIKW (SEQ ID NO: 463)
BMS3h-193-9
DIQLTQSPSSLSASVGDRVTITCRASQTIERRLNWYQQKPGKAPKLLIYLASRLQSGVPSRFSGSGSGTEFTLTISSLQ
PEDFATYYCHQYESPPLTFGQGTKVEIKR (SEQ ID NO: 464)
BMS3h-193-10
DIQMSQSPSTLSASVGDRVTITCRASQTIERRLNWYQQKPGKAPKLLIYLASRLQSGVPSRFSGSGSGTDFTLTISSLQ
PEDFATYYCHQYESPPLMFGQGTKVEIKR (SEQ ID NO: 465)
BMS3h-193-11
DIQMTQSPSSLSASVGDRVTITCRASQTIERRLNWYQQKPGKDPKLLIYLASRLQSGVPSRFSGSGSGTDFTLTISSLQ
PEDFATYYCHQYESPPLTFGQGTKVEIKR (SEQ ID NO: 466)
BMS3h-193-12
DIQMTQSPSSLSASVGDRVTITCRASQTIERRLNWYQQKPGKAPKLLIYLASRLQSGVPSRFSGSGSGTDFTLTISSLQ
PEDFATYYCHQYESPPLTFGQGTKVEIKR (SEQ ID NO: 467)
BMS3h-193-13
DIQMTQSPSSLFASVGDRVTITCRASQTIERRLNWYQQKPGKAPKLLIYLASRLQSGVPSRFSGSGSGTDFTLTISSLQ
PEDFATYYCHQYESPPLTFGQGTKVEIKR (SEQ ID NO: 468)
BMS3h-193-14
DIQMTQYPSSLSASVGDRVTITCRASQSIERRLNWYQQKPGEAPKLLIYLASRLQSGVPSRFSGSGSGTDFTLTISSLQ
PEDFATYYCHQYESPPLTFGQGTKVEIKR (SEQ ID NO: 469)
BMS3h-193-15
DIQMTQSPSSLSASVGDRVTITCRASRTIERRLNWYQQKPGKAPKLLIYLASRLQSGVPSRFSGSGSGTDFTLTISSLQ
PEDFATYYCHPYESPPLTFGQGTKVEIKR (SEQ ID NO: 470)
BMS3h-193-16
DIQMTQSPSSLSASVGDRVTITCRASQAIERRLNWYQQKPGKAPKLLIYLASRLQSGVPSRFSGSGSGTDFTLTISSLQ
PEDFATYYCHQYASPPLTLGQGTKVEIKR (SEQ ID NO: 471)
BMS3h-193-17
NIQMTQSPSSLSASVGDRVTITCRASQAIERRLNWYQQKPGKAPKLLIYLASRLQSGVPSRFSGSGSGTDFTLTISSLQ
PEDFATYYCHQYESPPLTFGQGTKVEIKR (SEQ ID NO: 472)
BMS3h-193-18
DIQMTQSPSSLSASVGDRVTITCRASQTIGRRLNWYQQKPGKAPKLLIYLASRLQSGVPSRFSGSGSGSDFTLTISSLQ
PEDFATYYCHQYESPPLTFGQGTKVEIKR (SEQ ID NO: 473)
BMS3h-193-19
DIQMTQSPSSLSASVGDRVTITCRASQTIERRLNWYQQKPGKAPKLLIYLASRLQSGVPSRFSGSGSGTEFTLTISSLQ
PEDFATYYCHQYESPPLTFGQGTKVEIKR (SEQ ID NO: 474)
BMS3h-193-20
DIQMTQTPSSLSASVGDRVTITCRASQTIERRLNWYQQKPGEAPKLLIYLASRLQSGVPSRFSGSGSGTDFTLTISSLQ
PEDFATYYCHQYESPPLTFGQGTKVKIKR (SEQ ID NO: 475)
BMS3h-193-21
DIQMTQSPSSLSASVGDSVTITCRASQTIERRLNWYQQKPGKAPKLLIYLASRLQSGVPSRFSGSGSGTDFTLTISSLQ
PEDFATYYCHQYESPPLTFGQGTKVEIKR (SEQ ID NO: 476)
BMS3h-193-22
HIQMTQSPSSLSASVGDRVTITCRASQTIERRLNWYQQKPGKAPKLLIYLASRLQSGVPSRFSGSGSGTDFTLTISSLQ
PEDFATYYCHQYESPPLTFGQGTKVEIKR (SEQ ID NO: 477)
BMS3h-193-23
DVQMTQSPSSLSASVGDRVTITCRASQTIERRLNWYQQKPGEAPKLLIYLTSRLQSGVPSRFSGSGSGTDFTLTISSLQ
PEDFATYYCHQYASPPLTFGQGTKVEIKR (SEQ ID NO: 478)
BMS3h-193-24
DIQMTQSPSSLSASVGDRVTITCRASQTIERRLNWYQQKPGKAPKLLIYLASRLQSGVPSRFSGSGSGTDFTLTISSLQ
PEDFATYYCHQYESPPLTFGQGTKWIKR (SEQ ID NO: 479)
BMS3h-193-25
DIQMTQSPSSLSASVGDRVTITCRASQTIERRLNWYQQKPGKAPRLLIYLATRLQSGVPSRFSGSGSGTDFTLTISSLQ
PEDFATYYCHQYESPPLTFGQGTKVEIKR (SEQ ID NO: 480)
BMS3h-193-26
DIQMTQSPSSLSASVGDRVTITCRASQPIERRLNWYQQKPGKAPKLLIYLASRLQSGVPSRFSGSGSGTDFTLTISSLQ
PEDFATYYCHQYESPPLTFGQGTKVEIKR (SEQ ID NO: 481)
BMS3h-193-27
DIQMTQSPSSLSASVGDRVTITCRASQTIGRRLNWYQQKPGKAPKLLIYLASRLQSGVPSRFSGSGSGTDFTLTISSLQ
PEDFATYYCHQYESPPLTFGQGTKVEIKR (SEQ ID NO: 482)
BMS3h-193-28
DIQMTQSPSSLSASVGDRVTITCRASQSIERRLNWYQQKPGKAPKLLIYLASRLQSGVPSRFSGSGSGTDFTLTISSLQ
PEDFATYYCHQYESPPLTFGQGTKVEIIR (SEQ ID NO: 483)
BMS3h-193-29
DIQMTQSPSSLSASVGDRVTITCRASQTIERRLNWYQQKPGKAPKLLIYLATRLQSGVPSRFSGSGSGTDFTLTISSLQ
PEDFATYYCHQYESPPLTFGQGTKVEIKR (SEQ ID NO: 484)
BMS3h-193-30
DIQMTQSPSSLSASVGDRVTITCRASQSIERRLNWYQQKPGKAPKLLIYLASRLQSGVPSRFSGSGSGTDFTLTISSLQ
PEDFATYYCHQYESPPLTFGQGTKVEIKR (SEQ ID NO: 485)
BMS3h-193-2501
DIQMTQSPSSLSASVGDRVTITCRASQTIERRLNWYQQKPGKAPRLLIYLATRLQSGVPSRFSGSGSGTDFTLTISSLQ
PEDFATYYCHQFEHPPLTFGQGTKVEIKR (SEQ ID NO: 486)
BMS3h-193-2502
DIQMTQSPSSLSASVGDRVTITCRASFPIDRRLNWYQQKPGKAPRLLIYLATRLQSGVPSRFSGSGSGTDFTLTISSLQ
PEDFATYYCHQYESPPLTFGQGTKVEIKR (SEQ ID NO: 487)
BMS3h-193-2503
DIQMTQSPSSLSASVGDRVTITCRASSTIGRRLNWYQQKPGKAPRLLIYLATRLQSGVPSRFSGSGSGTDFTLTISSLQ
PEDFATYYCHQYESPPLTFGQGTKVEIKR (SEQ ID NO: 488)
BMS3h-193-2504
DIQMTQSPSSLSASVGDRVTITCRASSQIGRRLNWYQQKPGKAPRLLIYLATRLQSGVPSRFSGSGSGTDFTLTISSLQ
PEDFATYYCHQYESPPLTFGQGTKVEIKR (SEQ ID NO: 489)
BMS3h-193-2505
DIQMTQSPSSLSASVGDRVTITCRASERIGRRLNWYQQKPGKAPRLLIYLATRLQSGVPSRFSGSGSGTDFTLTISSLQ
PEDFATYYCHQYESPPLTFGQGTKVEIKR (SEQ ID NO: 490)
BMS3h-193-2506
DIQMTQSPSSLSASVGDRVTITCRASQQIGRRLNWYQQKPGKAPRLLIYLATRLQSGVPSRFSGSGSGTDFTLTISSLQ
PEDFATYYCHQYESPPLTFGQGTKVEIKR (SEQ ID NO: 491)
BMS3h-193-2507
DIQMTQSPSSLSASVGDRVTITCRASQPIARRLNWYQQKPGKAPRLLIYLATRLQSGVPSRFSGSGSGTDFTLTISSLQ
PEDFATYYCHQYESPPLTFGQGTKVEIKR (SEQ ID NO: 492)
BMS3h-193-2508
DIQMTQSPSSLSASVGDRVTITCRASGNIGRRLNWYQQKPGKAPRLLIYLATRLQSGVPSRFSGSGSGTDFTLTISSLQ
PEDFATYYCHQYESPPLTFGQGTKVEIKR (SEQ ID NO: 493)
BMS3h-193-2509
DIQMTQSPSSLSASVGDRVTITCRASRNIDRRLNWYQQKPGKAPRLLIYLATRLQSGVPSRFSGSGSGTDFTLTISSLQ
PEDFATYYCHQYESPPLTFGQGTKVEIKR (SEQ ID NO: 494)
BMS3h-193-2510
DIQMTQSPSSLSASVGDRVTITCRASQSIGRRLNWYQQKPGKAPRLLIYLATRLQSGVPSRFSGSGSGTDFTLTISSLQ
PEDFATYYCHQYESPPLTFGQGTKVEIKR (SEQ ID NO: 495)
BMS3h-193-2511
DIQMTQSPSSLSASVGDRVTITCRASQNIGTRLNWYQQKPGKAPRLLIYLATRLQSGVPSRFSGSGSGTDFTLTISSLQ
PEDFATYYCHQYESPPLTFGQGTKVEIKR (SEQ ID NO: 496)
BMS3h-193-2512
DIQMTQSPSSLSASVGDRVTITCRASEVIGRRLNWYQQKPGKAPRLLIYLATRLQSGVPSRFSGSGSGTDFTLTISSLQ
PEDFATYYCHQYESPPLTFGQGTKVEIKR (SEQ ID NO: 497)
BMS3h-193-2513
DIQMTQSPSSLSASVGDRVTITCRASEAIGRRLNWYQQKPGKAPRLLIYLATRLQSGVPSRFSGSGSGTDFTLTISSLQ
PEDFATYYCHQYESPPLTFGQGTKVEIKR (SEQ ID NO: 498)
BMS3h-193-2514
DIQMTQSPSSLSASVGDRVTITCRASTSIARRLNWYQQKPGKAPRLLIYLATRLQSGVPSRFSGSGSGTDFTLTISSLQ
PEDFATYYCHQYESPPLTFGQGTKVEIKR (SEQ ID NO: 499)
BMS3h-193-2515
DIQMTQSPSSLSASVGDRVTITCRASLNIGRRLNWYQQKPGKAPRLLIYLATRLQSGVPSRFSGSGSGTDFTLTISSLQ
PEDFATYYCHQYESPPLTFGQGTKVEIKR (SEQ ID NO: 500)
BMS3h-193-2516
DIQMTQSPSSLSASVGDRVTITCRASQTIERRLNWYQQKPGKAPRLLIYLSSKLQSGVPSRFSGSGSGTDFTLTISSLQ
PEDFATYYCHQYESPPLTFGQGTKVEIKR (SEQ ID NO: 501)
BMS3h-198-1
EVQLLESGGGLVQPGGSLRLSCAASGSTIAGYEMWWVRQAPGKGLERVSAISGSGGSTYYADSVKGRFTISRDDSKNTL
YLQMNSLRAEDTAVYYCARDPYSFDYWGQGTLVTVSS (SEQ ID NO: 502)
BMS3h-198-2
EVQPLESGGGLVQPGGSLRLSCAASGFTFAGYEMWWVRQAPGKGLERISAISGSGGSTYYADSVKGRFTISRDDSKNTL
YLQMNSLRAEDTAVYYCARDPYSFDYWGQGTLVTVSS (SEQ ID NO: 503)
BMS3h-198-3
EVQLLESGGGSVQPGGSLRLSCAATGSTFAGYEMWWVRQAPGKGLERVSAISGSGGSTYYADSVKGRFTISRDDSKNTL
YLQMNSLRAEDTAVYYCARDPYSYDYWGQGTLVSVSS (SEQ ID NO: 504)
BMS3h-198-4
EVQLLESGGGLVQPGGSLRLSCAASGLTFAGYEMWWVRQAPGKGLERVSAISGSGGSTYYADSVKGRFTISRDDSKNTL
YLQMNSLRAEDTAVYHCARDPYSFDYWGQGTLVTVSS (SEQ ID NO: 505)
BMS3h-198-5
EVQLLESGGGLVQPGGSLRLSCAASGFTFAGYEMWWVRQAPGKGLERVSAISGSGGSTYYADSVKGRFTISRDDSKNTL
YLQMNSLRAEDTAVYHCAKEPYSYDYWGQGTLVTVSS (SEQ ID NO: 506)
BMS3h-198-6
EVQLLESGGGLVQPGGSLRLSCAASGSTFAGYEMWWVRQAPGKGLERVSAISGSGGSTYYADSVKGRFTISRDDSKNTL
YLQMNSLRPEDTAVYYCVKDPYSFDYWGQGTLVTVSS (SEQ ID NO: 507)
BMS3h-198-7
EVQLLESGGGLVQPGGSLRLSCAASGSTIAGYEMWWVRQAPGKGLERVSAISGSGGSTYYADSVKGRFTISRDDSKNTL
YLQMNSLRAEDTAVYYCARDPYSFDYWGQGTPVTVSS (SEQ ID NO: 508)
BMS3h-198-8
EVQLMESGGGLVQPGGSLRLSCAASGSTFAGYEMWWYRQAPGKGLERVSAISGSGRSTYYADSVKGRFTISRDDSKNTL
YLQMNSLRAEDTAVYYCAKDPYSFDYWGQGTLVTVSS (SEQ ID NO: 509)
BMS3h-198-9
EVQLLESGGGLVQPGGSLRLSCAASGFTFAGYEMWWVRQAPGKGLERVSAISGSGGSTYYADSVKGRFTISRDDSKNTL
YLQMNSLRAEDTAVYYCAKEPYSFDYWGQGTLVTVSS (SEQ ID NO: 510)
BMS3h-198-10
EVQLLESGGGLVQPGGSLRLSCAASGSTIAGYEMWWVRQAPGKGLERVSAISGSGGSTYYADSVKGRFTISRDDSKNTL
YLQMNSLRAEDTAVYYCAKDPYSFDYWGQGTLVTVSS (SEQ ID NO: 511)
BMS3h-198-11
EVQLLESGGGLVQPGGSLRLSCAASGFTFAGYEMWWVRQAPGKGLERVSAISGSGGSTYYADSVKGRFTISRDDSKNTL
YLQMNSLRAEDTAVYYCARDPYSFDYWGQGTLVSVSS (SEQ ID NO: 512)
BMS3h-198-12
EVQLLESGGGLVQPGGSLRLSCAASGFTIAGYEMWWVRQAPGKGLERVSAISGSGGSTYYADSVKGRFTISRDDSKNTL
YLQMNSLRAEDTAVYYCAKDPYSFDYWGQGTLVTVSS (SEQ ID NO: 513)
BMS3h-198-13
EVQLLESGGGLVQPGGSLRLSCAASGFTFAGYEMWWVRQAPGKGLERVSAISGSGGSTYYADSVKGRFTITRDDSKNTL
YLQMNSLRAEDTAVYYCAKEPYSFDYWGQGTLVTVSS (SEQ ID NO: 514)
BMS3h-198-14
EVQLLESGGGLVQPGGSLRLSCAASGFTFAGYEMWWFRQAPGKGLERVSAISGSGGSTYYADSVKGRFTISRDDTKNTL
YLQMNSLRAEDTAVYYCAKDPYSFDYWRQGTLVTVSS (SEQ ID NO: 515)
BMS3h-198-15
EVQLLESGGGLVQPGGSLRLSCAASGSTFAGYEVWWVRQAPGKGLERVSAISGSGGSTYYADSVKGRFTISRDDSKNTL
YLQMNSLRAEDTAVYYCARDPYSFDYWGQGTLVTVSS (SEQ ID NO: 516)
BMS3h-198-16
EVQLLESGGGLVQPGGSLRLSCAASGSTFAGYEMWWVRQAPGKGLERISAISGSGGSTYYADSVKGRFTISRDDSKNTL
YLKMNSLRAEDTAVYYCAKDPYSFDYWGQGTLVTVSS (SEQ ID NO: 517)
BMS3h-198-17
EVQLLESGGGLVQPGGSLRLSCAASGFTFAGYEMWWVRQAPGKGLERVSAISGSGGSTYYADSVKGRFTISRDDSKNTL
YLQMNSLRAEDTAVYYCARDPYSFDYWGQGTLVTVSS (SEQ ID NO: 518)
BMS3h-198-18
EVQLLESGGGLVQPGGSLRLSCAASGLTFAGYEMWWVRRAPGKGLERVAAISGSGGSTYYADSVKGRFTISRDDSKNTL
YLQMNSLRAEDTAVYYCARDPYSFDYWGQGTLVTVSS (SEQ ID NO: 519)
BMS3h-198-19
EVQLLESGGGLVQPGGSLRLSCAASGFTFAGYELWWVRQAPGKGLERVSAISGSGGSTYYADSVKGRFTISRDDSKNTL
YLQMNSLRAEDTAVYYCARDPYSFDYRGQGTLVTVSS (SEQ ID NO: 520)
BMS3h-198-20
EVQLLESGGGLVQPGGSLRLSCAAPGFTLAGYEMWWVRQAPGKGLERVSAISGSGGSTYYADSVKGRFTISRDDSKNTL
YLQMNSLRAEDTAVYYCAKEPYSFDYWGQGTLVTVSS (SEQ ID NO: 521)
BMS3h-198-21
EVQLLESGGGLVQPGGSLRLSCAASGLTFAGYEMWWVRRAPGKGLERVSAISGSGGSTYYADSVKGRFTTSRDDSKNTL
YLQMNSLRAEDTAVYYCARDPYSFDYWGRGTLVTVSS (SEQ ID NO: 522)
BMS3h-198-22
EVQLLESGGGLVQPGGSLRLSCAASGFTFAGYEMWWVRQAPGKGLERVSAISGSGGSTYYADSVKGRFTISRDDSKNTL
YLQMNSLRAEDTAVYYCAKEPYSYDYWGHGTLVTVSS (SEQ ID NO: 523)
BMS3h-198-23
EVQPLESGGGLVQPGGSLRLSCAASGFTFAGYEMWWVRQAPGKGLERVSAISGSGGNTYYADSVKGRFTISRDDSKNTL
YLQMNSLRAEDTGVYYCARDPYSFDYWGQGTLVTVSS (SEQ ID NO: 524)
BMS3h-198-24
EVQLLESGGGLVQPGGSLRLSCAASGFTFAGYEMWWVRQAPGKGLERVSAISGSGGSTYYADSVKGRFTISRDDSKNTL
YLQMNSLRAEDTAVYYCAKEPYSFDSWGQGTLVTVSS (SEQ ID NO: 525)
BMS3h-198-25
EAQLLESGGGLVQPGGSLRLSCAASGLTFAGYEMWWVRQAPGKGLERVSAISGSGGSTYYADSVKGRFTISRDDSKNTL
YLQMNSLRAEDTAVYYCARDPYSFDYWGQGTLVTVSS (SEQ ID NO: 526)
BMS3h-198-26
EVQLLESGGGLVQPGGSLRLSCAASGSTFAGYEMWWVRQAPGKGLERVSAISGSGGSTYYADSVKGRFSISRDDSKNTL
YLQMNSLRAEDTAVYYCAKEPYSFDHWGQGTLVTVSS (SEQ ID NO: 527)
BMS3h-198-27
EVQLLESGGGLVQPGGSLRLSCAASGSTFAGYEMWWVRRAPGKGLERVSAISGSGGSTYYADSVKGRFTISRDDSKNTL
YLQMNSLRAEDTAVYYCARDPYSFDYWGQGTLVTVSS (SEQ ID NO: 528)
BMS3h-198-28
EVQLLESGGGLVQPGGSLRLSCAASGFTFAGYEMWWFRQAPGKGLERVSAISGSGGSTYYADSVKGRFTISRDDSKNTL
YLQMNSLRAEDTAVYYCAKDPYSFDNWGQGTLVTVSS (SEQ ID NO: 529)
BMS3h-198-29
EVQLLESGGGLVEPGGSLRLSCAASGFTFAGYEMWWVRQAPGKGLERVSAISGSGGSTYYADSVKGRFTISRDDSKNTL
YLQMNSLRAEDTAVYYCAKEPYSFDHRGQGTLVTVSS (SEQ ID NO: 530)
BMS3h-198-30
EVQLLESGGGLVQPGGSLRLSCAASGYTFAGYEMWWVRQAPGKGLERVSAISGSGGSTYYADSVKGRFTISRDDSKNTL
YLQMNSLRAEDTAVYYCAKEPYSFDHRGQGTLVTVSS (SEQ ID NO: 531)
BMS3h-198-31
EVQLLESGGGLVQPGGSLRLSCAASGFTFAGYEMWWVRQAPGKGLERVSAISGSGGSTYYADSVKGRFTISRDNSKNTL
YLQMNSLRAEDTAVYHCAKEPYSYDYWGQGTLVTVSS (SEQ ID NO: 532)
BMS3h-198-32
EVQLLESGGGLVQPGGSLRLSCAASGFTFAGYEMWWFRQAPGKGLERVSAISGSGGSTWADSVKGRFTISRDNSKNTL
YLQMNSLRAEDTAVYYCAKDPYSFDNWGQGTLVTVSS (SEQ ID NO: 533)
BMS3h-198-33
EVQLLESGGGLVQPGGSLRLSCAASGFTFAGYEMWWVRQAPGKGLERVSAISGSGGSTYYADSVKGRFTISRDDSKNTL
YLQMNSLRAEDTAVYYCAKEPYSYDYWGQGTLVTVSS (SEQ ID NO: 534)
BMS3h-198-34
EVQLLESGGGLVQPGGSLRLSCAASGFTFAGYEMWWVRQAPGKGLERVSAISGSGGSTYYADSVKGRFTISRDDSKNTL
YLQMNSLRAEDTAVYYCAKDPYSFDNWGQGTLVTVSS (SEQ ID NO: 535)
BMS3h-198-35
EVQLLESGGGLVQPGGSLRLSCAASGFTFAGYEMWWVRQAPGKGLEWVSAISGSGGSTYYADSVKGRFTISRDDSKNTL
YLQMNSLRAEDTAVYHCAKEPYSYDYWGQGTLVTVSS (SEQ ID NO: 536)
BMS3h-198-36
EVQLLESGGGLVQPGGSLRLSCAASGFTFAGYEMWWFRQAPGKGLEWVSAISGSGGSTYYADSVKGRFTISRDDSKNTL
YLQMNSLRAEDTAVYYCAKDPYSFDNWGQGTLVTVSS (SEQ ID NO: 537)
BMS3h-198-37
EVQLLESGGGLVQPGGSLRLSCAASGFTFAGYELWWVRQAPGKGLERVSAISGSGGSTYYADSVKGRFTISRDDSKNTL
YLQMNSLRAEDTAVYYCAKDPYSFDYRGQGTLVTVSS (SEQ ID NO: 538)
BMS3h-198-38
EVQLLESGGGLVQPGGSLRLSCAASGFTFAGYELWWVRQAPGKGLERVSAISGSGGSTYYADSVKGRFTISRDDSKNTL
YLQMNSLRAEDTAVYYCARDPYSFDYWGQGTLVTVSS (SEQ ID NO: 539)
BMS3h-202-1
EVQLLESGGGLVQPGGSLRLSCAASGFTFPTAEMLWVRKAPGKGLEWVSSISASGGSTYYADSVKGRFTISRDNSKNTL
YLQMNSLRAEDTAVYYCAKEPVSYVATFDYWGQGTLVTVSS (SEQ ID NO: 540)
BMS3h-202-2
EVQLLVSGGGLVQPGGSLRLSCAASGFTFPTAEMLWVRQAPGKGPEWVSSISASGGSTYYADSVKGRFTISRDNSKNTL
YLQMNSLRAEDTAVYYCAKEPVSYVATFDYWGQGTLVTVSS (SEQ ID NO: 541)
BMS3h-202-3
EVQLLESGGGLVQPGGSLRLSCAASGFTFPTAEMVWVRKAPGMGLEWVSSISASGGYTYYADSVKGRFTISRDNSKNML
YLQMNSLRAEDTAVYYCAKEPVSYVATFDYWGQGALVTVTS (SEQ ID NO: 542)
BMS3h-202-4
EVQLLVSGGGLVQPGGSLRLSCAASGFTFPTAEMVWVRQAPGKGLEWVSSISASGGSTYYADSVKGRFSISRDDSKNTL
YLQMNSLRAEDTAVYYCAKEPVSYVATFDYWGHGALVTVSS (SEQ ID NO: 543)
BMS3h-202-5
EVQLLESGGGLVQPGGSLRLSCAASGFTFPTAEMLWVRQAPGKGLEWVSSISASGGSTYYADSVKGRFTISRDNSKNTL
YLQMNSLRAEDTAVYYCAKEPVSYVATFDYWGQGTLVTVSS (SEQ ID NO: 544)
BMS3h-202-6
EAQLLESGGGLVQPGGSLRLSCAASGFTFPTAEMVWVRQAPGKGLEWISSISASGGSTYYADSVKGRFTISRDNSKNTL
YLQLNSLRAEDTAVYYCAKEPVSYVATFDYWGRGTLVTVSS (SEQ ID NO: 545)
BMS3h-202-7
EVQLLESGGGLVQPGGSLRLSCAASGFTFPTAEMLWVRQAPGKGLEWVSSISASGGSTYYADSVKGRFTISRDNSKSTL
YLQMNSLRAEDTAVYYCAKEPVSYVATFDYWGPGALVTVSS (SEQ ID NO: 546)
BMS3h-202-8
EVQLLESGGGLVQPGGSLRLSCAASGFTFPTAEMLWVRKAPGKGLEWVSSISASGGSTYYADSVKGRFTISRDNSKNTL
FLQMNSLRAEDTAVYYCAKEPVSYVATFDYWGQGTLVTVSS (SEQ ID NO: 547)
BMS3h-202-9
EVQLLESGGGLVQPGGSLRLSCAASGFTFPTAEMLWVRQAPGKGLEWVSSISASGGSTYYADSVKGRFTISRDNSKNTL
YLQMNSLRAEDTAVYYCAKEPVSYVATFDYWGPGALVTVSS (SEQ ID NO: 548)
BMS3h-202-10
EVQLLESGGGLVQPGGSLRLSCAASGFTFPTAEMLWVRQAPGKGLEWVSSISASGGSTYYADSVKGRFTISRDNSKNTL
YLQMNSLRAEDTAVYYCAKEPVYYVATFDYWGQGTLVTVSS (SEQ ID NO: 549)
BMS3h-202-11
EVQLLESGGGLVQPGGSLRLSCAASGFTFPTAEMLWVRKAPGKGLEWVSSISASGGSTYYADSVKGRFTISRDNSKNTL
YLQMNSLRAEDAAVYYCAKEPVSYVATFDYWGQGTLVTVSS (SEQ ID NO: 550)
BMS3h-217-1
NIQMTQSPSSLSASVGDRVTITCRASHFIGTLLTWYQHKPGKAPKLLITYGSLLQSGVPSRFSGSGSGTDFTLTISSLQ
PEDFATYYCGQGVLWPATFGQGTKVEIKR (SEQ ID NO: 551)
BMS3h-217-2
DIQMTQSPSSLSASVGDRVTITCRASHFIGTLLSWYQQKPRKAPKLLITYGSLLQSGVPSRFSGSGSGTDFTLTISSLH
PEDFATYYCGQGVLWPPTFGQGTKVEIKR (SEQ ID NO: 552)
BMS3h-217-3
DIQMTQSPSSLTASVGDRVTITCRASHFIGTLLSWYQQKPGKAPKLLVTYGSLLQSGVPSRFSGSGSGTDFTLTISNLQ
PEDFATYYCGQGVLWPPTFGQGTKVENIR (SEQ ID NO: 553)
BMS3h-217-4
DIQMTQSPSSLSASVGDRVTITCRASHFIATLLSWYQQKPGKAPKLLITYGSLLQSGVPSRFSGSGSGTDFTLTISSLQ
PEDFATYYCGQGVLWPPTFGQGTKVEIKR (SEQ ID NO: 554)
BMS3h-217-5
DIQMTQSPSFLSASVGDRVTITCRASHFIATLLSWYQQKPGKAPKLLITYGSLLQSGVPSRFSGSGSGTDFTLTISSLQ
PEDFATYYCGQGVLWPPTFGQGTKVEIKR (SEQ ID NO: 555)
BMS3h-217-6
DIQMTQSPSSLSASVGDRVTITCRASHFIGTLLSWYQQKPGKATKLLITYGSLLQSGVPSRFSGSGSGTDFTLTISSLQ
PEDFATYYCGQGVLWPPTFGQGTKVEIKR (SEQ ID NO: 556)
BMS3h-217-7
DIQMTQSPSSLSASVGDRVTITCRASHFIGSLLSWYQHKPGKAPKLLITYGSLLQSGVPSRFSGSGSGTDFTLTISSLQ
PEDFATYYCGQGVLWPATFGQGTKVEIKR (SEQ ID NO: 557)
BMS3h-217-8
DIQMTQSPSSLSASVGDRVTITCRASHFIGTLLSWYQHKPGKAPKLLITYGSLLQSGVPSRFSGSGSGTDFTLTISSLQ
PEDFATYYCGQGVLWPATFGQGTKVEIKR (SEQ ID NO: 558)
BMS3h-217-9
DIQMTQSPSSLSASVGDRVTITCRASHFIGTLLSWYQHKPGKAPKLLITYGSMLQSGVPSRFSGSGSGTDFTLTISSLQ
PEDFATYYCGQGVLWPATFGQGTKVEIKR (SEQ ID NO: 559)
BMS3h-217-10
DIQMTQSPSSLSASVGDRVTITCRASHFIGTLLSWYQHKPGKAPKLLITYGSLLQSGVPSRFSGSGSGTEFTLTISSLQ
PEDFATYYCGQGVLWPATFGQGTKVEIKR (SEQ ID NO: 560)
BMS3h-217-11
DIQMTQSPSSLTASVGDRVTITCRASHFIGTLLSWYQHKPGKAPKLLITYGSLLQSGVPSRFSGSGSGTEFTLTISSLQ
PEDFATYYCGQGVLWPATFGQGTKVEIKR (SEQ ID NO: 561)
BMS3h-217-12
NIQMTQSPSSLSASVGDRVTITCRASHFIGTLLSWYQHKPGKAPKLLITYGSLLQSGVPSRFSGSGSGTDFTLTISSLQ
PEDFATYYCGQGVLWPATFGQGTKVEIKR (SEQ ID NO: 562)
BMS3h-217-13
DIQMTQSPSSLSASVGDRVTINCRASHFIGTLLSWYQHKPGKAPKLLITYGSLLQSGVPSRFSGSGSGTDFTLTISSLQ
PEDFATYYCGQGVLWPATFGQGTKVEIKR (SEQ ID NO: 563)
BMS3h-217-14
DIQLTQSPSSLSASVGDRVTITCRASHFIGTLLSWYQQKPGKATKLLITYGSLLQSGVPSRFSGSGSGTDFTLTISSLQ
PEDFATYYCGQGVLWPPTFGQGTKVEIKR (SEQ ID NO: 564)
BMS3h-217-15
DIQMTQSPSSLYASVGDRVTITCRVSHFIGTLLSWYQQKPGKAPKLLITYGSLLQSGVPSRFSGSGSGTDFTLSISSLQ
PEDFATYYCGQGVLWPPTFGQGTKVEIKQ (SEQ ID NO: 565)
BMS3h-217-16
DIQMTQSPSSLSASVGDRVTITCRASHFIGTLLSWYQQKPRKAPKLLITYGSLLQSGVPSRFSGSGSGTDFTLTISSLQ
PEDFATYYCGQGVLWPPTFGQGTKVEIKR (SEQ ID NO: 566)
BMS3h-217-17
DIQIIQSPSSLSASVGDRVTITCRASHFIGTLLSWYQQKPGKAPKLLITYGSLLQSGVPSRFSGSGSGTDFTLTISSLQ
PEDFATYYCGQGVLWPPTFGQGTKVEIKR (SEQ ID NO: 567)
BMS3h-217-18
DIQMTQSPSSLSASVGDRVTITCRASHFIGTLLSWYQLKPGKAPKLLITYGSLLQSGVPSRFSGSGSGTDFTLTISSLQ
PEDFATYYCGQGVLWPATFGQGTKVEIKR (SEQ ID NO: 568)
BMS3h-217-19
DIQMTQSPSSLSASVGDRVTITCRASHFIGTLLSWYQLKPGKAPKLLITYGSWLQSGVPSRFSGSGSGTDFTLTISSLQ
PEDFATYYCGQGVLWPATFGQGTKVENKR (SEQ ID NO: 569)
BMS3h-217-20
DIQMTQSPSSLSASVGDRVTITCRASHFIGTLLSWYQLKPGKAPKLLITYGSLLQRGVPSRFSGSGSGTDFTLTISSLQ
PEDFATYYCGQGVLWPATFGQGTKVEIKR (SEQ ID NO: 570)
BMS3h-217-21
DIQMTQAPSSLSASVGDRVTITCRASHFIGTLLSWYQLKPGKAPKLLITYGSLLQSGVPSRFSGSGSGTDFTLTISSLQ
PEDFATYYCGQGVLWPATFGQGTKVENKR (SEQ ID NO: 571)
BMS3h-217-22
DIQMTQSPSSLSASVGDRVTITCRASHFIGSLLSWYQQKPGKAPKLLITYGSLLQSGVPSRFSGSGSGTDFALTISSLQ
PEDFATYYCGQGVLWPATFGQGTKVEIKR (SEQ ID NO: 572)
BMS3h-217-23
DIQMTQSPSSLSASVGDRVTITCRASHFIGSLLSWYQVKPGKAPKLLITYGSLLQSGVPSRFSGSGSGTDFTLTISSLQ
PEDFATYYCGQGVLWPATFGQGTTVEIKR (SEQ ID NO: 573)
BMS3h-217-24
DILMTQSPSSLSASVGDRVTITCRASHFIGSLLSWYQQKPGKAPKLLITYGSLLQSGVPSRFSGSGSGTDFTLTISSLQ
PEDFATYYCGQGVLWPATFGQGTKVEIKR (SEQ ID NO: 574)
BMS3h-217-25
DIQMTQSPSSLSASVGDRVTITCRASHFIGTLVSWYQQKPGKAPKLLITYGSLLQSGVPSRFSGSGSGTDFTLTISSLQ
PEDFATYYCGQGVLWPATYGQGTKVEIKR (SEQ ID NO: 575)
BMS3h-217-26
DIQMTQSPSSLSASVGDRVTITCRASHFIGTLVSWYQQKPGKAPKLLITYGSLLQSGVPSRFSGSGSGTDFTLTISSLQ
PEDFATYYCGQGVLWPATFGQGTKVENKR (SEQ ID NO: 576)
BMS3h-217-27
DIKMTQSPSSLSASVGDRVTITCRASHFIGTLVSWYQQKPGKAPKLLITYGSMLQSGVPSRFSGSGSGTDFTLTISSLQ
PEDFATYYCGQGVLWPATFGQGTKVEIKR (SEQ ID NO: 577)
BMS3h-217-28
DIQMTQSPSSLSASVGDRVTITCQASHFIGTLVSWYQQKPGKAPKLLITYGSLLQSGVPSRFSGSGSGTDFTLTISSLQ
PEDFATYYCGQGVLWPATFGQGTKVEIKR (SEQ ID NO: 578)
BMS3h-217-29
DIQMTQSPSSLSASVGDRVTITCRASHFIGTLLSWYQQKPGKAPKLLITYGSWLQSGVPSRFSGSGSGTDFTLTISSLQ
PEDFATYYCGQGVLWPATFGQGTKVEIKR (SEQ ID NO: 579)
BMS3h-217-30
DIQMTQSPSSLSASVGDRVTITCRASHFIGTLLSWYQLKPGKAPKLLITYGSWLQSGVPSRFSGSGSGTDFTLTISSLQ
PEDFATYYCGQGVLWPATFGQGTKVEIKR (SEQ ID NO: 580)
BMS3h-217-31
DIQMTQSPSSLSASVGDRVTITCRASHFIGTLLSWYQQKPGKAPKLLITYGSLLQSGVPSRFSGSGFGTDFTLTISSLQ
PEDFATYYCGQEVLWPATFGQGTKVEIKR (SEQ ID NO: 581)
BMS3h-217-32
DIQMTQSPSSLSASVGDRVSITCRASHFIGTLLSWYQQKPGKAPKLLITYGSLLQSGVPSRFSGSGFGTDFTLTISSLQ
PEDFATYYCGQEVLWPATFGQGTKVEIKR (SEQ ID NO: 582)
BMS3h-217-33
DIQMTQSPSSLSASVGDRVTITCQASHFIGTLLSWYQQKPGKAPKLLITYGSLLQSGVPSRFSGSGFGTDFTLTISSLQ
PEDFATYYCGQEVLWPATFGQGTKVEIKR (SEQ ID NO: 583)
BMS3h-217-34
DIQMTQSPSSLSASVGDRVTITCRASHFIGTLLSWYQQKPGKAPKLLITYGSLLQSGVPSRFSGSGFGTEFTLTIGSLQ
PEDFATYYCGQGVLWPATFGQGTKVEIKR (SEQ ID NO: 584)
BMS3h-217-35
DIQMTQSPSSLSASVGDRVTITCRASHFIGTLLSWYQQKPGKATKLLITYGSLLQSGVPSRFSGSGSGTDFTLTISSLQ
PEDFATYYCGQGVLWPPTFGQGTKVEIKR (SEQ ID NO: 585)
BMS3h-217-2301
DIQMTQSPSSLSASVGDRVTITCRASHFIASLLSWYQVKPGKAPKLLITYGSLLQSGVPSRFSGSGSGTDFTLTISSLQ
PEDFATYYCGQGVLWPATFGQGTTVEIKR (SEQ ID NO: 586)
BMS3h-217-2302
DIQMTQSPSSLSASVGDRVTITCRASHFIAQLLSWYQVKPGKAPKLLITYGSLLQSGVPSRFSGSGSGTDFTLTISSLQ
PEDFATYYCGQGVLWPATFGQGTTVEIKR (SEQ ID NO: 587)
BMS3h-217-2303
DIQMTQSPSSLSASVGDRVTITCRASHFIAQLLSWYQVKPGKAPKLLITYGSLLQSGVPSRFSGSGSGTDFTLTISSLQ
PEDFATYYCGQGVLWPATFGQGTTVEIRR (SEQ ID NO: 588)
BMS3h-217-2304
DIQMTQSPSSLSASVGDRVTITCRASHYIASLLSWYQVKPGKAPKLLITYGSLLQSGAPSRFSGSGSGTDFTLTISSLQ
PEDFATYYCGQGVLWPATFGQGTTVEIKR (SEQ ID NO: 589)
BMS3h-217-2305
DIQMTQSPSSLSASVGDRVTITCRASHFIGSLLSWYQVKPGKAPKLLITWASYLQSGVPSRFSGSGSGTDFTLTISSLQ
PEDFATYYCGQGVLWPATFGQGTTVEIKR (SEQ ID NO: 590)
BMS3h-217-2306
DIQMTQSPSSLSASVGDRVTITCRASHFIGSLLSWYQVKPGKAPKLLITWTSYLQSGVPSRFSGSGSGTDFTLTISSLQ
PEDFATYYCGQGVLWPATFGQGTTVEIKR (SEQ ID NO: 591)
BMS3h-217-2307
DIQMTQSPSSLSASVGDRVTITCRASHFIGSLLSWYQVKPGKAPKLLITWSSYLQSGVPSRFSGSGSGTDFTLTISSLQ
PEDFATYYCGQGVLWPATFGQGTTVEIKR (SEQ ID NO: 592)
BMS3h-217-2308
DIQMTQSPSSLSASVGDRVTITCRASHFIGSLLSWYQVKPGKAPKLLITWGSWLQSGVPSRFSGSGSGTDFTLTISSLQ
PEDFATYYCGQGVLWPATFGQGTTVEIKR (SEQ ID NO: 593)
BMS3h-217-2309
DIQMTQSPSSLSASVGDRVTITCRASHFIGSLLSWYQVKPGKAPKLLITWASWLQSGVPSRFSGSGSGTDFTLTISSLQ
PEDFATYYCGQGVLWPATFGQGTTVEIKR (SEQ ID NO: 594)
BMS3h-217-2310
DIQMTQSPSSLSASVGDRVTITCRASHFIGSLLSWYQVKPGKAPKLLITWSSWLQSGVPSRFSGSGSGTDFTLTISSLQ
PEDFATYYCGQGVLWPATFGQGTTVEIKR (SEQ ID NO: 595)
BMS3h-217-2311
DIQMTQSPSSLSASVGDRVTITCRASHWIAQLLSWYQVKPGKAPKLLITYGSLLQSGVPSRFSGSGSGTDFTLTISSLQ
PEDFATYYCGQGVLWPATFGQGTTVEIKR (SEQ ID NO: 596)
BMS3h-217-2312
DIQMTQSPSSLSASVGDRVTITCRASHFIGSLLRWYQVKPGKAPKLLITYGSLLQSGVPSRFSGSGSGTDFTLTISSLQ
PEDFATYYCGQGVLWPATFGQGTTVEIKR (SEQ ID NO: 597)
BMS3h-217-2313
DIQMTQSPSSLSASVGDRVTITCRASHRIAQLLSWYQVKPGKAPKLLITYGSLLQSGVPSRFSGSGSGTDFTLTISSLQ
PEDFATYYCGQGVLWPATFGQGTTVEIKR (SEQ ID NO: 598)
BMS3h-217-2314
DIQMTQSPSSLSASVGDRVTITCRASHYIASLLSWYQVKPGKAPKLLITYGSLLQSGVPSRFSGSGSGTDFTLTISSLQ
PEDFATYYCGQGVLWPATFGQGTTVEIKR (SEQ ID NO: 599)
BMS3h-217-2315
DIQMTQSPSSLSASVGDRVTITCRASHFIGSLLSWYQVKPGKAPKLLIRFGSLLQSGVPSRFSGSGSGTDFTLTISSLQ
PEDFATYYCGQGVLWPATFGQGTTVEIKR (SEQ ID NO: 600)
BMS3h-217-2316
DIQMTQSPSSLSASVGDRVTITCRASHFIGSLLSWYQVKPGKAPKLLITYKSYLQSGVPSRFSGSGSGTDFTLTISSLQ
PEDFATYYCGQGVLWPATFGQGTTVEIKR (SEQ ID NO: 601)
BMS3h-217-2317
DIQMTQSPSSLSASVGDRVTITCRASHFIGSLLSWYQVKPGKAPKLLITWGSYLQSGVPSRFSGSGSGTDFTLTISSLQ
PEDFATYYCGQGVLWPATFGQGTTVEIKR (SEQ ID NO: 602)
BMS3h-217-2318
DIQMTQSPSSLSASVGDRVTITCRASHFIWGPLSWYQVKPGKAPKLLITYGSLLQSGVPSRFSGSGSGTDFTLTISSLQ
PEDSATYYCGQGVLWPATFGQGTTVEIKR (SEQ ID NO: 603)
BMS3h-217-2319
DIQMTQSPSSLSASVGDRVTITCRASHWIATLLSWYQVKPGKAPKLLITYGSLLQSGVPSRFSGSGSGTDFTLTISSLQ
PEDFATYYCGQGVLWPATFGQGTTVEIKR (SEQ ID NO: 604)
BMS3h-217-2320
DIQMTQSPSSLSASVGDRVTITCRASHFIWGPLSWYQVKPGKAPKLLITYGSLLQSGVPSRFSGSGSGTDFTLTISSLQ
PEDFATYYCGQGVLWPATFGQGTTVEIKR (SEQ ID NO: 605)
BMS3h-217-2321
DIQMTQSPSSLSASVGDRVTITCRASHFIGSLLNWYQVKPGKAPKLLITYGSLLQSGVPSRFSGSGSGTDFTLTISSLQ
PEDFATYYCGQGVLWPATFGQGTTVEIKR (SEQ ID NO: 606)
BMS3h-217-2322
GIQMTQSPSSLSASVGDRVTITCRASHFIGSLLSWYQVKPGKAPKLLITYGSWLQSGVPSRFSGSGSGTDFTLTISSLQ
PEDFATYYCGQGVLWPATFGQGTTVEIKR (SEQ ID NO: 607)

TABLE 4
Human Anti-CD40 Variable Domain Encoding Nucleotide Sequences

BMS3h-56-201
GAGGTGCAGCTGTTGGAGTCCGGGGGAGGCTTGGTACAGCCTGGGGGGTCCCTGCGTCTCTCCTGTGCAGCCTCCGGAT
TCACCTTTCGGGATTATGAGATGTGGTGGGTCCGCCAGGCTCCAGGGAAGGGTCTAGAGCGGGTCTCAGCTATTAATCC
GCAGGGTACGCGTACATACTACGCAGACTCCGTGAAGGGCCGGTTCACCATCTCCCGCGACAATTCCAAGAACACGCTG
TATCTGCAAATGAACAGCCTGCGTGCCGAGGACACCGCGGTATATTACTGTGCGAAACTTCCGTTTTACTTTCAGGAGT
GGGGTCAGGGAACCCTGGTCACCGTCTCGAGC (SEQ ID NO: 608)
BMS3h-56-258
GAGGTGCAGCTGTTGGAGTCTGGGGGAGGCTTGGTACAGCCTGGGGGGTCCCTGCGTCTCTCCTGTGCAGCCTCCGGAT
TCACCTTTCGGGATTATGAGATGTGGTGGGTCCGCCAGGCTCCAGGGAAGGGTCTAGAGCGGGTCTCAGCTATTAATCC
GCAGGGTACGCGTACATACTACGCAGACTCCGTGAAGGGCCGGTTCACCATCTCCCGCGACAATTCCAAGAACACGCTG
TATCTGCAAATGAACAGCCTGCGTGCCGAGGACACCGCGGTATATTACTGTGCGAAACTTCCGTTTTACTTTCACGAGT
GGGGTCAGGGAACCCTGGTCACCGTCTCGAGC (SEQ ID NO: 609)
BMS3h-37
GAGGTGCAGCTGTTGGAGTCTGGGGGAGGCTTGGTACAGCCTGGGGGGTCCCTGCGTCTCTCCTGTGCAGCCTCCGGAT
TCACCTTTGAGTGGTATGAGATGCAGTGGGTCCGCCAGGCTCCAGGGAAGGGTCTAGAGTGGGTCTCAGCGATTTCTGG
TGATGGTTATCGTACATACTACGCAGACTCCGTGAAAGGCCGGTTCACCATCTCCCGCGACAATTCCAAGAACACGCTG
TATCTGCAAATGAACAGCCTGCGTGCCGAGGACACCGCGGTATATTACTGTGCGAAAGAGCTTGGGTATTTTGACTACT
GGGGTCAGGGAACCCTGGTCACCGTCTCGAGC (SEQ ID NO: 610)
BMS3h-38
GAGGTGCAGCTGTTGGAGTCTGGGGGAGGCTTGGTACAGCCTGGGGGGTCCCTGCGTCTCTCCTGTGCAGCCTCCGGAT
TCACCTTTGAGGAGGAGGAGATGATTTGGGTCCGCCAGGCTCCAGGGAAGGGTCTAGAGTGGGTCTCAGCTATTAGTGG
TAGTGGTGGTAGCACATACTACGCAGACTCCGTGAAGGGCCGGTTCACCATCTCCCGCGACAATTCCAAGAACACGCTG
TATCTGCAAATGAACAGCCTGCGTGCCGAGGATACCGCGGTATATTACTGTGCGAAAGAGCCGTTTCGTTTTGACTACT
GGGGTCAGGGAACCCTGGTCACCGTCTCGAGC (SEQ ID NO: 611)
BMS3h-41
GAGGTGCAGCTGTTGGAGTCTGGGGGAGGCTTGGTACAGCCTGGGGGGTCCCTGCGTCTCTCCTGTGCAGCCTCCGGAT
TCACCTTTACTGAGTATGAGATGATTTGGGTCCGCCAGGCTCCAGGGAAGGGTCTGGAGTGGGTCTCATCTATTTCGGG
TAATGGTGCTAATACATACTACGCAGACTCCGTGAAGGGCCGGTTCACCATCTCCCGCGACAATTCCAAGAACACGCTG
TATCTGCAAATGAACAGCCTGCGTGCCGAGGACACCGCGGTATATTACTGTGCGAAAGAGCCGCTTAGGTTTGACTACT
GGGGTCAGGGAACCCTGGTCACCGTCTCGAGC (SEQ ID NO: 612)
BMS3h-43
GAGGTGCAGCTGTTGGAGTCTGGGGGAGGCTTGGTACAGCCTGGGGGGTCCCTGCGTCTCTCCTGTACAGCCTCCGGAT
TCACCTTTAATATGTATGAGATGTCGTGGGTCCGCCAGGCTCCAGGGAAGGGTCTAGAGTGGGTCTCAGGTATTAGTAG
GCGTGGTTTTACTACATACTACGCAGACTCCGTGAAGGGCCGGTTCACCATCTCCCGCGACAATTCCAAGAACACGCTG
TATCTGCAAATGAACAGCCTGCGTGCCGAGGATACCGCGGTATATTACTGTGCGAAAGAGCCGATTACGTATGCTATGA
GGTATGCGCGTTTTGACTACTGGGGTCAGGGAACCCTGGTCACCGTCTCGAGC (SEQ ID NO: 613)
BMS3h-56
GAGGTGCAGCTGTTGGAGTCTGGGGGAGGCTTGGTACAGCCTGGGGGGTCCCTGCGTCTCTCCTGTGCAGCCTCCGGAT
TCACCTTTCGGGATTATGAGATGTGGTGGGTCCGCCAGGCTCCAGGGAAGGGTCTAGAGCGGGTCTCAGCTATTAATCC
GCAGGGTACGCGTACATACTACGCAGACTCCGTGAAGGGCCGGTTCACCATCTCCCGCGACAATTCCAAGAACACGCTG
TATCTGCAAATGAACAGCCTGCGTGCCGAGGATACCGCGGTATATTACTGTGCGAAACTTCCGTTTATTTTTGACTACT
GGGGTCAGGGAACCCTGGTCACCGTCTCGAGC (SEQ ID NO: 614)
BMS3h-106
GAGGTGCAGCTGTTGGAGTCTGGGGGAGGCTTGGTACAGCCTGGGGGGTCCCTGCGTCTCTCCTGTGCAGCCTCCGGAT
TCACCTTTTCGACTTATCATATGCAGTGGGTCCGCCAGGCTCCAGGGAAGGGTCTGGAGTGGGTCTCAATGATTGATGC
GGATGGTCTTGGGACATACTACGCAGACTCCGTGAAGGGCCGGTTCACCATCTCCCGCGACAATTCCAAGAACACGCTG
TATCTGCAAATGAACAGCCTGCGTGCCGAGGACACCGCGGTATATTACTGTGCGAAACCGGGTCCGCAGTTTGGTCAGT
TTGACTACTGGGGTCAGGGAACCCTGGTCACCGTCTCGAGC (SEQ ID NO: 615)
BMS3h-107
GAGGTGCAGCTGTTGGAGTCTGGGGGAGGCTTGGTACAGCCTGGGGGGTCCCTGCGTCTCTCCTGTGCAGCTTCCGGAT
TCACCTTTTCGGGGTATGATATGCAGTGGGTCCGCCAGGCTCCAGGGAAGGGTCTAGAGTGGGTCTCAACGATTAGTGC
GTCGGGTGTTTTTACATACTACGCAGACTCCGTGAAGGGCCGGTTCACCACCTCCCGCGACAATTCCAAGAACACGCTG
TATCTGCAAATGAACAGCCTGCGTGCCGAGGACACCGCGGTATATTACTGTGCGAAATATCCTAATCGTTTTGCGCTTA
ATAATTTTGACTACTGGGGTCAGGGAACCCTGGTCACCGTCTCGAGC (SEQ ID NO: 616)
BMS3h-131
GACATCCAGATGACCCAGTCTCCATCCTCCCTGTCTGCATCTGTAGGAGACCGTGTCACCATCACTTGCCGGGCAAATA
GTTCTATTTTGTGGGCGTTAGCTTGGTACCAGCAGAAACCAGGGAAAGCCCCTAAGCTCCTGATCGAGAGTTCTTCCGG
TTTGCAAAGTGGGGTCCCATCACGTTTCAGTGGCAGTGGATCTGGGACAGATTTCACTCTCACCATCAGCAGTCTGCAA
CCTGAAGATTTTGCTACGTACTACTGTGTTCAGAATGCGGGTTGGCCTGGTACGTTCGGCCAAGGGACCAAGGTGGAAA
TCAAACGG (SEQ ID NO: 617)
BMS3h-193
GACATCCAGATGACCCAGTCTCCATCCTCCCTGTCTGCATCTGTAGGAGACCGTGTCACCATCACTTGCCGGGCAAGTC
AGACGATTGAGCGTCGTTTAAATTGGTATCAGCAGAAACCAGGGAAAGCCCCTAAGCTCCTGATCTATCTTGCTTCCCG
TTTGCAAAGTGGGGTCCCATCACGTTTCAGTGGCAGTGGATCTGGGACAGATTTCACTCTCACCATCAGCAGTCTGCAA
CCTGAAGATTTTGCTACGTACTACTGTCATCAGTATGCGAGTCCACCTTTGACGTTCGGCCAAGGGACCAAAGTGGAAA
TCAAACGG (SEQ ID NO: 618)
BMS3h-198
GAGGTGCAGCTGTTGGAGTCTGGGGGAGGCTTGGTACAGCCTGGGGGGTCCCTGCGTCTCTCCTGTGCAGCCTCCGGAT
TCACCTTTGCTGGGTATGAGATGTGGTGGGTCCGCCAGGCTCCAGGGAAGGGTCTAGAGCGGGTCTCAGCTATTAGTGG
TAGTGGTGGTAGCACATACTACGCAGACTCCGTGAAGGGCCGGTTCACCATCTCCCGCGACGATTCCAAGAACACGCTG
TATCTGCAAATGAACAGCCTGCGTGCCGAGGATACCGCGGTATATTACTGTGCGAAAGATCCTTATAGTTTTGACTACT
GGGGTCAGGGAACCCTGGTCACCGTCTCGAGC (SEQ ID NO: 619)
BMS3h-202
GAGGTGCAGCTGTTGGAGTCTGGGGGAGGCTTGGTACAGCCTGGGGGGTCCCTGCGTCTCTCCTGTGCAGCCTCCGGAT
TCACCTTTCCGACTGCTGAGATGGTGTGGGTCCGCCAGGCTCCAGGGAAGGGTCTAGAGTGGGTCTCATCTATTTCGGC
TAGTGGTGGTTCTACATACTACGCAGACTCCGTGAAGGGCCGGTTCACCATCTCCCGCGACAATTCCAAGAACACGCTG
TATCTGCAAATGAACAGCCTGCGTGCCGAGGACACCGCGGTATATTACTGTGCGAAAGAGCCGGTGAGTTATGTGGCGA
CGTTTGACTACTGGGGTCAGGGAACCCTGGTCACCGTCTCGAGC (SEQ ID NO: 620)
BMS3h-217
GACATCCAGATGACCCAGTCTCCATCCTCCCTGTCTGCATCTGTAGGAGACCGTGTCACCATCACTTGCCGGGCAAGTC
ATTTTATTGGTACTCTGTTATCTTGGTACCAGCAGAAACCAGGGAAAGCCCCTAAGCTCCTGATCACTTATGGTTCCTT
GTTGCAAAGTGGGGTCCCATCACGTTTCAGTGGCAGTGGATCTGGGACAGATTTCACTCTCACCATCAGCAGTCTGCAA
CCTGAAGATTTTGCTACGTACTACTGTGGTCAGGGGGTGCTGTGGCCTGCGACGTTCGGCCAAGGGACCAAGGTGGAAA
TCAAACGG (SEQ ID NO: 621)
BMS3h-1
GAGGTGCAGCTGTTGGAGTCTGGGGGAGGCTTGGTACAGCCTGGGGGGTCCCTGCGTCTCTCCTGTGCAGCCTCCGGAT
TCACCTTTCCGAAGAATGAGATGACGTGGGTCCGCCAGGCTCCAGGGAAGGGTCTAGAGTGGGTCTCAGCGATTGAGTC
GGATGGTCAGGCTACATACTACGCAGACTCCGTGAAGGGCCGGTTCACCATCTCCCGCGACAATTCCAAGAACACGCTG
TATCTGCAAATGAACAGCCTGCGTGCTGAGGACACCGCGGTATATTACTGTGCGAAAAATCGGATTCCTGATCTTGTGT
TTGACTACTGGGGTCAGGGAACCCTGGTCACCGTCTCGAGC (SEQ ID NO: 622)
BMS3h-2
GAGGTGCAGCTGTTGGAGTCTGGGGGAGGCTTGGTACAGCCTGGGGGGTCCCTGCGTCTCTCCTGTGCAGCCTCCGGAT
TCACCTTTGATGCTGGGGCTATGACGTGGGTCCGCCAGGCTCCAGGGAAGGGTCTAGAGTGGGTCTCATCTATTGATAA
GGAGGGTCTGTCTACATACTACGCAGACTCCGTGAAGGGCCGGTTCACCATCTCCCGCGACAATTCCAAGAACACGCTG
TATCTGCAAATGAACAGCCTGCGTGCCGAGGATACCGCGGTATATTACTGTGCGAAAGGTAGGATTCCTGGGCTGGTTT
TTGACTACTGGGGTCAGGGAACCCTGGTCACCGTCTCGAGC (SEQ ID NO: 623)
BMS3h-3
GAGGTGCAGCTGTTGGAGTCTGGGGGAGGCTTGGTACAGCCTGGGGGGTCCCTGCGTCTCTCCTGTGCAGCCTCCGGAT
TCACCTTTGGTGATGCGGCGATGACTTGGGTCCGCCAGGCTCCAGGGAAGGGTCTAGAGTGGGTCTCAGCGATTCAGCC
TATGGGTGATGGTACATACTACGCAGACTCCGTGAAGGGCCGGTTCACCGTCTCCCGCGACAATTCCAAGAACACGCTG
TATCTGCAAATGAACAGCCTGCGTGCCGAGGACACCGCGGTATATTACTGTGCGAAAGGGCGTATTCCTACTCTTCAGT
TTGACTACTGGGGTCAGGGAACCCTGGTCACCGTCTCGAGC (SEQ ID NO: 624)
BMS3h-4
GAGGTGCAGCTGTTGGAGTCTGGGGGAGGCTTGGTACAGCCTGGGGGGTCCCTGCGTCTCTCCTGTGCAGCCTCCGGAT
TCACCTTTGAGGATTCGCCTATGACTTGGGTCCGCCAGGCTCCAGGGAAGGGTCTAGAGTGGGTCTCAGCTATTACTTC
GAATGGTTATGAGACATACTACGCAGACTCCGTGAAGGGCCGGTTCACCATCTCCCGCGACAATTCCAAGAACACGCTG
TATCTGCAAATGAACAGCCTGCGTGCCGAGGACACCGCGGTATATTACTGTGCGAAAGGGCGTATTCCTACTCTTCATT
TTGACTACTGGGGTCAGGGAACCCTGGTCACCGTCTCGAGC (SEQ ID NO: 625)
BMS3h-5
GAGGTGCAGCTGTTGGAGTCTGGGGGAGGCTTGGTACAGCCTGGGGGGTCCCTGCGTCTCTCCTGTGCAGCCTCCGGAT
TCACCTTTGATGAGCATGATATGAGTTGGGTCCGCCAGGCTCCAGGGAAGGGTCTAGAGTGGGTCTCACGTATTGGTCC
GGATGGTTTTCATACATACTACGCAGACTCCGTGAAGGGCCGGTTCACCATCTCCCGCGACAATTCCAAGAACACGCTG
TATCTGCAAATGAACAGCCTGCGTGCCGAGGACACCGCGGTATATTACTGTGCGAAAGGGCGTATTCCTACTCTTCATT
TTGACTACTGGGGTCAGGGAACCCTGGTCACCGTCTCGAGC (SEQ ID NO: 626)
BMS3h-6
GAGGTGCAGCTGTTGGAGTCTGGGGGAGGCTTGGTACAGCCTGGGGGGTCCCTGCGTCTCTCCTGTGCAGCCTCCGGAT
TCACCTTTGGTGAGTATCATATGTCTTGGGTCCGCCAGGCTCCAGGGAAGGGTCTAGAGTGGGTCTCAAGGATTACTCC
TCTTGGTACGCTTACATACTACGCAGACTCCGTGAAGGGCCGGTTCACCATCTCCCGCGACAATTCCAAGAACACGCTG
TATCTGCAAATGAACAGCCTGCGTGCCGAGGACACCGCGGTATATTACTGTGCGAAAGGGCGTATTCCTTCGCTTACGT
TTGACTACTGGGGTCAGGGAACCCTGGTCACCGTCTCGAGC (SEQ ID NO: 627)
BMS3h-7
GAGGTGCAGCTGTTGGAGTCTGGGGGAGGCTTGGTACAGCCTGGGGGGTCCCTGCGTCTCTCCTGTGCAGCCTCCGGAT
TCACCTTTGGTACGAATGCGATGAGTTGGGTCCGCCAGGCTCCAGGGAAGGGTCTGGAGTGGGTCTCAAGGATTTCGCC
GGGTGGTGATTATACATACTACGCAGACTCCGTGAAGGGCCGGTTCACCATCTCCCGCGACAATTCCAAGAACACGCTG
TATCTGCAAATGAACAGCCTGCGTGCCGAGGATACCGCGGTGTATTACTGTGCGAAAGGGCGTGTTCCGGATCTGCTTT
TTGACTACTGGGGTCAGGGAACCCTGGTCACCGTCTCGAGC (SEQ ID NO: 628)
BMS3h-8
GAGGTGCAGCTGTTGGAGTCTGGGGGAGGCTTGGTACAGCCTGGGGGGTCCCTGCGTCTCTCCTGTGCAGCCTCCGGAT
TCACCTTTCCGTCTGAGGAGATGTCTTGGGTCCGCCAGGCTCCAGGGAAGGGTCTAGAGTGGGTCTCAAGGATTTCGGC
TGATGGTGCTAATACATACTACGCAGACTCCGTGAAGGGCCGGTTCACCATCTCCCGCGACAATTCCAAGAACACGCTG
TATCTGCAAATGAACAGCCTGCGTGCCGAGGACGCCGCGGTATATTACTGTGCGAAAGGGCGTGTTCCGGATCTGCTTT
TTGACTACTGGGGTCAGGGAACCCTGGTCACCGTCTCGAGC (SEQ ID NO: 629)
BMS3h-9
GAGGTGCAGCTGTTGGAGTCTGGGGGAGGCTTGGTACAGCCTGGGGGGTCCCTGCGTCTCTCCTGTGCAGCCTCCGGAT
TCACCTTTGCTGAGGATGATATGACTTGGGTCCGCCAGGCTCCAGGGAAGGGTCTAGAGTGGGTCTCACGTATTGCGGT
TGATGGTGATCGGACATACTACGCAGACTCCGTGAAGGGCCGGTTCACCATCTCCCGCGACAATTCCAAGAACACGCTG
TATCTGCAAATGAACAGCCTGCGTGCCGAGGACACCGCGGTATATTACTGTGCGAAAGGTAAGGTTCCGTCTCTTCATT
TTGACTACTGGGGTCAGGGAACCCTGGTCACCGTCTCGAGC (SEQ ID NO: 630)
BMS3h-10
GAGGTGCAGCTGTTGGAGTCTGGGGGAGGCTTGGTACAGCCTGGGGGATCCCTGCGTCTCTCCTGTGCAGCCTCCGGAT
TCACCTTTAGGACGATGGATATGTCTTGGGTCCGCCAGGCTCCAGGGAAGGGTCTAGAGTGGGTCTCACGTATTACGGG
TGATGGTATGAATACATACTACGCAGACTCCGTGAAGGGCCGGTTCACCATCTCCCGCGACAATTCCAAGAACACGCTG
TATCTGCAAATGAACAGCCTGCGTGCCGGGGACACCGCGGTATATTACTGTGCGAAAGGGGTGACTCCGGATTTGACTT
TTGACTACTGGGGTCAGGGAACCCTGGTCACCGTCTCGAGC (SEQ ID NO: 631)
BMS3h-11
GAGGTGCAGCTGTTGGAGTCTGGGGGAGGCTTGGTACAGCCTGGGGGGTCCCTGCGTCTCTCCTGTGCAGCCTCCGGAT
TCACCTTTGAGCGTGATGATATGACGTGGGTCCGCCAGGCTCCAGGGAAGGGTCTAGAGTGGGTCTCACGTATTAATGC
TGGGGGTGTGCATACATACTACGCAGACTCCGTGAAGGGCCGGTTCACCATCTCCCGCGACAATTCCAAGAACACGCTG
TATCTGCAAATGAACAGCCTGCGTGCCGAGGATACCGCGGTATATTACTGTGCGAAAGGGGTGACTCCGGATTTGACTT
TTGACTACTGGGGTCAGGGAACCCTGGTCACCGTCTCGAGC (SEQ ID NO: 632)
BMS3h-12
GAGGTGCAGCTGTTGGAGTCTGGGGGAGGCTTGGTACAGCCTGGGGGGTCCCTGCGTCTCTCCTGTGCAGCCTCCGGAT
TCACCTTTGATGATGATTCTATGACGTGGGTCCGCCAGGCTCCAGGGAAGGGTCTAGAGTGGGTCTCACGGATTTCGAG
TGATGGTGCGAGTACATACTACGCAGACTCCGTGAAGGGCCGGTTCACCATCTCCCGCGACAATTCCAAGAACACGCTG
TATCTGCAAATGAACAGCCTGCGTGCCGAGGACACCGCGGTATATTACTGTGCGAAAGGGGTGACTCCGGATTTGACTT
TTGACTACTGGGGTCAGGGAACCCTGGTCACCGTCTCGAGC (SEQ ID NO: 633)
BMS3h-13
GAGGTGCAGCTGTTGGAGTCTGGGGGAGGCTTGGTACAGCCTGGGGGGTCCCTGCGTCTCTCCTGTGCAGCCTCCGGAT
TCACCTTTACTGAGGAGGATATGACGTGGGTCCGCCAGGCTCCAGGGAAGGGTCTAGAGTGGGTCTCACGTATTGATAG
TGTTGGTGAGGGGACATACTACGCAGACTCCGTGAAGGGCCGGTTCACCATCTCCCGCGACAATTCCAAGAACACGCTG
TATCTGCAAATGAACAGCCTGCGTGCCGAGGACACCGCGGTATATTACTGTGCGAAAGGGGTGACTCCGGATTTGACTT
TTGACTACTGGGGTCAGGGAACCCTGGTCACCGTCTCGAGC (SEQ ID NO: 634)
BMS3h-14
GAGGTGCAGCTGTTGGAGTCTGGGGGAGGCTTGGTACAGCCTGGGGGGTCCCTGCGTCTCTCCTGTGCAGCCTCCGGAT
TCACCTTTTCTGATTCGGCGATGAGTTGGGTCCGCCAGGCTCCAGGGAAGGGTCTAGAGTGGGTCTCACGGATTGATAA
TCCTGGTCAGCATACATACTACGCAGACTCCGTGAAGGGCCGGTTCACCATCTCCCGCGACAATTCCAAGAACACGCTG
TATCTGCAAATGAACAGCCTGCGTGCCGAGGATACCGCGGTATATTACTGTGCGAAAGGTACTGTTCCTACGCTGGAGT
TTGACTACTGGGGTCAGGGAACCCTGGTCACCGTCTCGAGC (SEQ ID NO: 635)
BMS3h-15
GAGGTGCAGCTGTTGGAGTCTGGGGGAGGCTTGGTACAGCCTGGGGGGTCCCTGCGTCTCTCCTGTGCAGCCTCCGGAT
TCACCTTTGGGCAGCATAGTATGACTTGGGTCCGCCAGGCTCCAGGGAAGGGTCTAGAGTGGGTCTCACGTATTGATGG
TGGGGGTTATAATACATACTACGCAGACTCCGTGAAGGGCCGGTTCACCATCTCCCGCGACAATTCCAAGAACACGCTG
TATCTGCAAATGAACAGCCTGCGTGCCGAGGACACCGCGGTATATTACTGTGCGAAAGGGGAGGTTCCTCGTCTTCATT
TTGACTACTGGGGTCAGGGAACCCTGGTCACCGTCTCGAGC (SEQ ID NO: 636)
BMS3h-16
GAGGTGCAGCTGTTGGAGTCTGGGGGAGGCTTGGTACAGCCTGGGGGGTCCCTGCGTCTCTCCTGTGCAGCCTCCGGAT
TCACCTTTGGTCAGGAGCCTATGACTTGGGTCCGCCAGGCTCCAGGGAAGGGTCTAGAGTGGGTCTCACGGATTGCGTA
TAATGGTGGTGATACATACTACGCAGACTCCGTGAAGGGCCGGTTCACCATCTCCCGCGACAATTCCAAGAACACGCTG
TATCTGCAAATGAACAGCCTGCGTGCCGAGGACACCGCGGTATATTACTGTGCGAAAGGGATTACTCCTAATTTGACTT
TTGACTACTGGGGTCAGGGAACCCTGGTCACCGTCTCGAGC (SEQ ID NO: 637)
BMS3h-17
GAGGTGCAGCTGTTGGAGTCTGGGGGAGGCTTGGTACAGCCTGGGGGGTCCCTGCGTCTCTCCTGTGCAGCCTCCGGAT
TCACCTTTGAGAATTATCCGATGTCTTGGGTCCGCCAGGCTCCAGGGAAGGGTCTAGAGTGGGTCTCACGTATTAATGC
TACGGGTTCTATTACATACTACGCAGACTCCGTGAAGGGCCGGTTCACCATCTCCCGCGACAATTCCAAGAACACGCTG
TATCTGCAAATGAACAGCCTGCGTGCCGAGGACACCGCGGTATATTACTGTGCGAAAGGGGTTATTCCTCATTTGATGT
TTGACTACTGGGGTCAGGGAACCCTGGTCACCGTCTCGAGC (SEQ ID NO: 638)
BMS3h-18
GAGGTGCAGCTGTTGGAGTCTGGGGGAGGCTTGGTACAGCCTGGGGGGTCCCTGCGTCTCTCCTGTGCAGCCTCCGGAT
TCACCTTTCGTGATTATGATATGAGTTGGGTCCGCCAGGCTCCAGGGAAGGGTCTAGAGTGGGTCTCACGTATTACTGG
TACTGGTAATAGTACATACTACGCAGACTCCGTGAAGGGCCGGTTCACCATCTCCCGCGACAATTCCAAGAACACGCTG
TATCTGCAAATGAACAGCCTGCGTGCCGAGGACACCGCGGTATATTACTGTGCGCAAGGGGTGGTGCCGTATCTTGCTT
TTGACTACTGGGGTCAGGGAACCCTGGTCACCGTCTCGAGC (SEQ ID NO: 639)
BMS3h-19
GAGGTGCAGCTGTTGGAGTCTGGGGGAGGCTTGGTACAGCCTGGGGGGTCCCTGCGTCTCTCCTGTGCAGCCTCCGGAT
TCACCTTTGAGGCTGATGCGATGACGTGGGTCCGCCAGGCTCCAGGGAAGGGTCTAGAGTGGGTCTCAAGGATTAATGT
GGATGGTGATCGGACATACTACGCAGACTCCGTGAAGGGCCGGTTCACCATCTCCCGCGACAATTCCAAGAACACGCTG
TATCTGCAAATGAACAGCCTGCGTGCCGAGGACACCGCGGTATATTACTGTGCGAAAGGTACTGTTCCTACGCTGGAGT
TTGACTACTGGGGTCAGGGAACCCTGGTCACCGTCTCGAGC (SEQ ID NO: 640)
BMS3h-21
GAGGTGCAGCTGTTGGAGTCTGGGGGAGGCTTGGTACAGCCTGGGGGGTCCCTGCGTCTCTCCTGTGCAGCCTCCGGAT
TCACCTTTGATCGGGCGGATATGACGTGGGTCCGCCAGGCTCCAGGGAAGGGTCTAGAGTGGGTCTCAAGGATTTCGGG
GGAGGGTAAGTGTACATACTACGCAGACTCCGTGAAGGGCCGGTTCACCATCTCCCGCGACAATTCCAAGAACACGCTG
TATCTGCAAATGAACAGCCTGCGTGCCGAGGACACCGCGGTATATTACTGTGCGAAAGGGATGGTTCCTAATTTGGTTT
TTGACTACTGGGGTCAGGGAACCCTGGTCACCGTCTCGAGC (SEQ ID NO: 641)
BMS3h-22
GAGGTGCAGCTGTTGGAGTCTGGGGGAGGCTTGGTACAGCCTGGGGGGTCCCTGCGTCTCTCCTGTGCAGCCTCCGGAT
TCACCTTTCATTGGGAGCCGATGTCTTGGGTCCGCCAGGCTCCGGGGAAGGGTCTAGAGTGGGTCTCACGTATTAATTC
TTCTGGTTGGGATACATACTACGCAGACTCCGTGAAGGGCCGGTTCACCATCTCCCGCGACAATTCCAAGAACACGCTG
TATCTGCAAATGAACAGCCTGCGTGCCGAGGACACCGCGGTATATTACTGTGCGAAAGGGATGGTTCCTAATTTGGTTT
TTGACTACTGGGGTCAGGGAACCCTGGTCACCGTCTCGAGC (SEQ ID NO: 642)
BMS3h-24
GAGGTGCAGCTGTTGGAGTCTGGGGGAGGCTTGGTACAGCCTGGGGGGTCCCTGCGTCTCTCCTGTGCAGCCTCCGGAT
TCACCTTTGCTGATGAGCCGATGACTTGGGTCCGCCAGGCTCCAGGGAAGGGTCTAGAGTGGGTCTCACGTATTCCTCC
TGAGGGTGCTCCGACATACTACGCAGACTCCGTGAAGGGCCGGTTCACCATCTCCCGCGACAATTCCAAGAACACGCTG
TATCTGCAAATGAACAGCCTGCGTGCCGAGGACACCGCGGTATATTACTGTGCGAAAGGGATTACTCCTAATTTGACTT
TTGACTACTGGGGTCAGGGAACCCTGGTCACCGTCTCGAGC (SEQ ID NO: 643)
BMS3h-26
GAGGTGCAGCTGTTGGAGTCTGGGGGAGGCTTGGTACAGCCTGGGGGGTCCCTGCGTCTCTCCTGTGCAGCCTCCGGAT
TCACCTTTCATAATCATGATATGTCTTGGGTCCGCCAGGCTCCAGGGAAGGGTCTAGAGTGGGTCTCACGTATTAGTCG
GGGTGGTCTTCAGACATACTACGCAGACTCCGTGAAGGGCCGGTTCACCATCTCCCGCGACAATTCCAAGAACACGCTG
TATCTGCAAATGAACAGCCTGCGTGCCGAGGACACCGCGGTATATTACTGTGCGAAAGGGATTGTGCCGGATCTGCATT
TTGACTACTGGGGTCAGGGAACCCTGGTCACCGTCTCGAGC (SEQ ID NO: 644)
BMS3h-27
GAGGTGCAGCTGTTGGAGTCTGGGGGAGGCTTGGTACAGCCTGGGGGGTCCCTGCGTCTCTCCTGTGCAGCCTCCGGAT
TCACCTTTAATGAGTATCCTATGTCGTGGGTCCGCCAGGCTCCAGGGAAGGGTCTAGAGTGGGTCTCACGTATTAATGG
GGATGGTGCTAATACATACTACGCAGACTCCGTGAAGGGCCGGTTCACCATCTCCCGCGACAATTCCAAGAACACGCTG
TATCTGCAAATGAACAGCCTGCGTGCCGAGGACACCGCGGTATATTACTGTGCGAAAGGGATTATTCCGGCTATGCAGT
TTGACTACTGGGGTCAGGGAACCCTGGTCACCGTCTCGAGC (SEQ ID NO: 645)
BMS3h-28
GAGGTGCAGCTGTTGGAGTCTGGGGGAGGCTTGGTACAGCCTGGGGGGTCCCTGCGTCTCTCCTGTGCAGCCTCCGGAT
TCACCTTTGGGGATGTGCCTATGTCGTGGGTCCGCCAGGCTCCAGGGAAGGGTCTAGAGTGGGTCTCAAGGATTGATCC
TTATGGTTCTAATACATACTACGCAGACTCCGTGAAGGGCCGGTTCACCATCTCCCGCGACAATTCCAAGAACACGCTG
TATCTGCAAATGAACAGCCTGCGTGCCGAGGACACCGCGGTATATTACTGTGCGAAAGGTATTATGCCTAGTCTTACTT
TTGACTACTGGGGTCAGGGAACCCTGGTCACCGTCTCGAGC (SEQ ID NO: 646)
BMS3h-29
GAGGTGCAGCTGTTGGAGTCTGGGGGAGGCTTGGTACAGCCTGGGGGGTCCCTGCGTCTCTCCTGTGCAGCCTCCGGAT
TCACCTTTGCGGATTATGATATGTCTTGGGTCCGCCAGGCTCCAGGGAAGGGTCTAGAGTGGGTCTCACGTATTTCGGC
GCTTGGTGCTACTACATACTACGCAGACTCCGTGAAGGGCCGGTTCACCATCTCCCGCGACAATTCCAAGAACACGCTG
TATCTGCAAATGAACAGCCTGCGTGCCGAGGACACCGCGGTATATTACTGTGCGAAAGGTCAGCTTCCGGCGTTGGAGT
TTGACTACTGGGGTCAGGGAACCCTGGTCACCGTCTCGAGC (SEQ ID NO: 647)
BMS3h-30
GAGGTGCAGCTGTTGGAGTCTGGGGGAGGCTTGGTACAGCCTGGGGGGTCCCTGCGTCTCTCCTGTGCAGCCTCCGGAT
TCACCTTTAAGCGTTATTATATGACTTGGGTCCGCCAGGCTCCAGGGAAGGATCTAGAGTGGGTCTCAGGTATTGTTCC
TTCTGGTAATAGGACATACTACGCAGACTCCGTGAAGGGCCGGTTCACCATCTCCCGCGACAATTCCAAGAACACGCTG
TATCTGCAAATGAACAGCCTGCGTGCCGAGGACACCGCGGTATATTACTGTGCGAAAGGTAGGATTCCGGATCTGCATT
TTGACTACTGGGGTCAGGGAACCCTGGTCACCGTCTCGAGC (SEQ ID NO: 648)
BMS3h-31
GAGGTGCAGCTGTTGGAGTCTGGGGGAGGCTTGGTACAGCCTGGGGGGTCCCTGCGTCTCTCCTGTGCAGCCTCCGGAT
TCACCTTTGCTGATTATGATATGACTTGGGTCCGCCAGGCTCCAGGGAAGGGTCTAGAGTGGGTCTCAAGGATTTCTCC
GACGGGTGGGCAGACATACTACGCAGACTCCGTGAAGGGCCGGTTCACCATCTCCCGCGACAATTCCAAGAACACGCTG
TATCTGCAAATGAACAGCCTGCGTGCCGAGGACACCGCGGTATATTACTGTGCGAAAGGTGTTATTCCGTATTTGTCTT
TTTCTCCGTTTGACTACTGGGGTCAGGGAACCCTGGTCACCGTCTCGAGC (SEQ ID NO: 649)
BMS3h-32
GAGGTGCAGCTGTTGGAGTCTGGGGGAGGCTTGGTACAGCCTGGGGGGTCCCTGCGTCTCTCCTGTGCAGCCTCCGGAT
TCACCTTTTCTAAGTATTGGATGGGTTGGGCCCGCCAGGCTCCAGGGAAGGGTCTAGAGTGGGTCTCATCGATTGATTC
GCATGGTGCTGGTACATACTACGCAGACTCCGTGAAGGGCCGGTTCACCATCTCCCGCGACAATTCCAAGAACACGCTG
TATCTGCAAATGAACAGCCTGCGTGTCGAGGACACCGCGGTATATTACTGTGCGAAAGGTGCTCCTAAGTTTATGACTA
CGTATACGTTTGACTACTGGGGTCAGGGAACCCTGGTCACCGTCTCGAGC (SEQ ID NO: 650)
BMS3h-33
GAGGTGCAGCTGTTGGAGTCTGGGGGAGGCTTGGTACAGCCTGGGGGGTCCCTGCGTCTCTCCTGTGCAGCCTCCGGAT
TCACCTTTTTGTCTTATCCGATGCATTGGGTCCGCCAGGCTCCAGGGAAGGGTCTAGAGTGGGTCTCATCGATTGATTC
GAGGGGTTCGGTTACATACTACGCAGACTCCGTGAAGGGCCGGTTCACCATCTCCCGCGACAATTCCAAGAACACGCTG
TATCTGCAAATGAACAGCCTGCGTGCCGAGGACACCGCGGTATATTACTGTGCGAAAGGTCATAGTTGGACGTTTGACT
ACTGGGGTCAGGGAACCCTGGTCACCGTCTCGAGC (SEQ ID NO: 651)
BMS3h-34
GAGGTGCAGCTGTTGGAGTCTGGGGGAGGCTTGGTACAGCCTGGGGGGTCCCTGCGTCTCTCCTGTGCAGCCTCCGGAT
TCACCTTTGCGAATAGTAATATGACTTGGGTCCGCCAGGCTCCAGGGAAGGGTCTAGAGTGGGTCTCACGTATTAATCC
GGATGGTGGGTCTACATACTACGCAGACTCCGTGAAGGGCCGGTTCACCATCTCCCGCGACAATTCCAAGAACACGCTG
TATCTGCAAATGAACAGCCTGCGTGCCGAGGACACCGCGGTATATTACTGTGCGGAAGGGCGTATTCCTACTCTTCATT
TTGACTACTGGGGTCAGGGAACCCTGGTCACCGTCTCGAGC (SEQ ID NO: 652)
BMS3h-35
GAGGTGCAGCTGTTGGAGTCTGGGGGAGGCTTGGTACAGCCTGGGGGGTCCCTGCGTCTCTCCTGTGCAGCCTCCGGAT
TCACCTTTGGGCCGAGGAGGATGGGTTGGGTCCGCCAGGCTCCAGGGAAGGGTCTAGAGTGGGTCTCATCGATTGATGA
TATTGGTCGTAGGACATACTACGCAGACTCCGTGAAGGGCCGGTTCACCATCTCCCGCGACAATTCCAAGAACACGCTG
TATCTGCAAATGAACAGCCTGCGTGCCGAGGACACCGCGGTATATTACTGTGCGGAAGGGGCGCAGGGTGTGTTGTTGT
TTGACTACTGGGGTCAGGGAACCCTGGTCACCGTCTCGAGC (SEQ ID NO: 653)
BMS3h-36
GAGGTGCAGCTGTTGGAGTCTGGGGGAGGCTTGGTACAGCCTGGGGGGTCCCTGCGTCTCTCCTGTGCAGCCTCCGGAT
TCACCTTTGAGGATTATAGGATGGTTTGGGTCCGCCAGGCTCCAGGGAAGGGTCTAGAGTGGGTCTCATCGATTTCTAC
TTCTGGTGAGCTGACATACTACGCAGACTCCGTGAAGGGCCGGTTCACCATCTCCCGCGACAATTCCAAGAACACGCTG
TATCTGCAAATGAACAGCCTGCGTGCCGAGGACACCGCGGTATATTACTGTGCGGAAACGGCGGGTCAGTTTTTTGACT
ACTGGGGTCAGGGAACCCTGGTCACCGTCTCGAGC (SEQ ID NO: 654)
BMS3h-39
GAGGTGCAGCTGTTGGAGTCTGGGGGAGGCTTGGTACAGCCTGGGGGGTCCCTGCGTCTCTCCTGTGCAGCCTCCGGAT
TCACCTTTCCGGAGTATGAGATGGTTTGGGTCCGCCAGGCTCCAGGGAAGGGTCTGGAGTGGGTCTCAGCGATTTCGCG
TGAGGGTCGGGCTACATACTACGCAGACTCCGTGAAGGGCCGGTTCACCATCTCCCGCGACAATTCCAAGAACACGCTG
TATCTGCAAATGAACAACCTGCGTGCCGAGGATACCGCGGTATATTACTGTGCGAAAGAGCCTGTTCGTTTTGACTACT
GGGGTCAGGGAACCCTGGTCACCGTCTCGAGC (SEQ ID NO: 655)
BMS3h-40
GAGGTGCAGCTGTTGGAGTCTGGGGGAGGCTTGGTACAGCCTGGGGGGTCCCTGCGTCTCTCCTGTGCAGCCTCCGGAT
TCACCTTTTCGACTTATGAGATGCTTTGGGTCCGCCAGGCTCCAGGGAAGGGTCTAGAGTGGGTCTCATCTATTTCTTC
TTCTGGTAATTATACATACTACGCAGACTCCGTGAAGGGCCGGTTCACCATCTCCCGCGACAATTCCAAGAACACGCTG
TATCTGCAAATGAACAGCCTGCGTGCCGAGGACACCGCGGTATATTACTGTGCGAAAGAGCCGCTGATGTTTGACTACT
GGGGTCAGGGAACCCTGGTCACCGTCTCGAGC (SEQ ID NO: 656)
BMS3h-42
GAGGTGCAGCTGTTGGAGTCTGGGGGAGGCTTGGTACAGCCTGGGGGGTCCCTGCGTCTCTCCTGTGCAGCCTCCGGAT
TCACCTTTGATACTGAGGAGATGAGTTGGGTCCGCCAGGCTCCAGGGAAGGGTCTAGAGTGGGTCTCAGCGATTAGTCC
TAATGGTGCTTTTACATTCTACGCAGACTCCGTGAAGGGCCGGTTCACCATCTCCCGCGACAATTCCAAGAACACGCTG
TATCTGCAAATGAACAGCCTGCGTGCCGAGGACACCGCGGTATATTACTGTGCGAAAGAGCCTATTCTGTTTGACTACT
GGGGTCAGGGAACCCTGGTCACCGTCTCGAGC (SEQ ID NO: 657)
BMS3h-44
GAGGTGCAGCTGTTGGAGTCTGGGGGAGGCTTGGTACAGCCTGGGGGGTCCCTGCGTCTCTCCTGTGCAGCCTCCGGAT
TCACCTTTGGTCATTATGATATGGTTTGGGTCCGCCAGGCTCCAGGGAGGGGTCTAGAGTGGGTCTCAACTATTAATGG
TGCTGGTCTGAATACATACTACGCAGACTCCGTGAAGGGCCGGTTCACCATCTCCCGCGACAATTCCAAGAACACGCTG
TATCTGCAAATGAACAGCCTGCGTGCCGAGGACACCGCGGTATATTACTGTGCGCAAAGTGCTAGTCGTATTTTTGACT
ACTGGGGTCAGGGAACCCTGGTCACCGTCTCGAGC (SEQ ID NO: 658)
BMS3h-45
GAGGTGCAGCTGTTGGAGTCTGGGGGAGGCTTGGTACAGCCTGGGGGGTCCCTGCGTCTCTCCTGTGCAGCCTCCGGAT
TCACCTTTAGGAGTTATGAGATGGCGTGGGTCCGCCAGGCTCCAGGGAAGGGTCTAGAGTGGGTCTCATCTATTAGTAC
TCTGGGTACGAAGACATACTACGCAGACTCCGTGAAGGGCCGGTTCACCATCTCCCGCGACAATTCCAAGAACACGCTG
TATCTGCAAATGAACAGCCTGCGTGCCGAGGACACCGCGGTATATTACTGTGCGCAATCTTCTACTCATATTTTTGACT
ACTGGGGTCAGGGAACCCTGGTCACCGTCTCGAGC (SEQ ID NO: 659)
BMS3h-46
GAGGTGCAGCTGTTGGAGTCTGGGGGAGGCTTGGTACAGCCTGGGGGGTCCCTGCGTCTCTCCTGTGCAGCCTCCGGAT
TCACCTTTATTAGGTATGAGATGGCTTGGGTCCGCCAGGCTCCAGGGAAGGGTCTAGAGTGGGTCTCAAGTATTTCGTC
GTCTGGTTGGACGACATACTACGCAGACTCCGTGAAGGGCCGGTTCACCATCTCCCGCGACAATTCCAAGAACACGCTG
TATCTGCAAATGAACAGCCTGCGTGCCGAGGATACCGCGGTATATTACTGTGCGAAAAGTGATGCTCATATTTTTGACT
ACTGGGGTCAGGGAACCCTGGTCACCGTCTCGAGC (SEQ ID NO: 660)
BMS3h-47
GAGGTGCAGCTGTTGGAGTCTGGGGGAGGCTTGGTACAGCCTGGGGGGTCCCTGCGTCTCTCCTGTGCAGCCTCCGGAT
TCACCTTTTATGCTTATGAGATGGCTTGGGTCCGCCAGGCTCCAGGGAAGGGTCTAGAGTGGGTCTCATCTATTTCGGA
TGATGGTACGCGGACATACTACGCAGACTCCGTGAAGGGCCGGTTCACCATCTCCCGCGACAATTCCAAGAACACGCTG
TATCTGCAAATGAACAGCCTGCGTGCCGAGGACACCGCGGTATATTACTGTGCGAAAGATCTGGGGCAGGGGTTTGACT
ACTGGGGTCAGGGAACCCTGGTCACCGTCTCGAGC (SEQ ID NO: 661)
BMS3h-48
GAGGTGCAGCTGTTGGAGTCTGGGGGAGGCTTGGTACAGCCTGGGGGGTCCCTGCGTCTCTCCTGTGCAGCCTCCGGAT
TCACCTTTGCTGATCATGGGATGACGTGGGTCCGCCAGGCTCCAGGGAAGGGTCTAGAGTGGGTCTCAGGGATTGGTCC
GTCTGGTGAGGCGACATACTACGCAGACTCCGTGAAGGGCCGGTTCACCATCTCCCGCGACAATTCCAAGAACACGCTG
TATCTGCAAATGAACAGCCTGCGTGCCGAGGACACCGCGGTATATTACTGTGCGAAAGATCGTATTCCTAATCTTGTGT
TTGACTACTGGGGTCAGGGAACCCTGGTCACCGTCTCGAGC (SEQ ID NO: 662)
BMS3h-49
GAGGTGCAGCTGTTGGAGTCTGGGGGAGGCTTGGTACAGCCTGGGGGGTCCCTGCGTCTCTCCTGTGCAGCCTCCGGAT
TCACCTTTGAGTCTCAGGATATGTCTTGGGTCCGCCAGGCTCCAGGGAAGGGTCTAGAGTGGGTCTCAGGTATTAGTCC
GAATGGTTGGGATACATACTACGCAGACTCCGTGAAGGGCCGGTTCACCATCTCCCGCGACAATTCCAAGAACACGCTG
TATCTGCAAATGAACAGCCTGCGTGCCGAGGATACCGCGGTATATTACTGTGCGAAAGATAGGTCTGATTTTGACTACT
GGGGTCAGGGAACCCTGGTCACCGTCTCGAGC (SEQ ID NO: 663)
BMS3h-50
GAGGTGCAGCTGTTGGAGTCTGGGGGAGGCTTGGTACAGCCTGGGGGGTCCCTGCGTCTCTCCTGTGCAGCCTCCGGAT
TCACCTTTGGGGATTATGATATGTGGTGGGTCCGCCAGGCTCCAGGGAAGGGTCTAGAGTGGGTCTCAAGGATTCGTCA
TCCGGGTGGTGTTACATACTACGCAGACTCCGTGAAGGGCCGGTTCACCATCTCCCGCGACAATTCCAAGAACACGCTG
TATCTGCAAATGAACAGCCTGCGTGCCGAGGACACCGCGGTATATTACTGTGCGAAAGCTGTTCCTAAGGGTTTTGACT
ACTGGGGTCAGGGAACCCTGGTCACCGTCTCGAGC (SEQ ID NO: 664)
BMS3h-51
GAGGTGCAGCTGTTGGAGTCTGGGGGAGGCTTGGTACAGCCTGGGGGGTCCCTGCGTCTCTCCTGTGCAGCCTCCGGAT
TCACCTTTCGGGTTTATTGGATGACTTGGGTCCGCCAGGCTCCAGGGAAGGGTCTAGAGTGGGTCTCATCTATTGATCC
GCAGGGTGGGATGACATACTACGCAGACTCCGTGAAGGGCCGGTTCACCATCTCTCGCGACAATTCCAAGAACACGCTG
TATCTGCAAATGAACAGCCTGCGTGCCGAGGATACCGCGGTATATTACTGTGCGAAAGCGCGTATTCCTAATTTGGAGT
TTGACTACTGGGGTCAGGGAACCCTGGTCACCGTCTCGAGC (SEQ ID NO: 665)
BMS3h-52
GAGGTGCAGCTGTTGGAGTCTGGGGGAGGCTTGGTACAGCCTGGGGAGTCCCTGCGTCTCTCCTGTGCAGCCTCCGGAT
TCACCTTTAGTGCTTATGATATGACGTGGGTCCGCCAGGCTCCAGGGAAGGGTCTTGAGTGGGTCTCACGTATTAATCC
GACGGGTTCTTATACATACTACGCAGACTCCGTGAAGGGCCGGTTCACCATCTCCCGCGACAATTCCAAGAACACGCTG
TATCTGCAAATGAACAGCCTGCGTGCCGAGGATACCGCGGTATATTACTGTGCGAAAGCTAAGATTCCGAATTTGGTTT
TTGACTACTGGGGTCAGGGAACCCTGGTCACCGTCTCGAGC (SEQ ID NO: 666)
BMS3h-53
GAGGTGCAGCTGTTGGAGTCTGGGGGAGGCTTGGTACAGCCTGGGGGGTCCCTGCGTCTCTCCTGTGCAGCCTCCGGAT
TCACCTTTGCGGATAGTGAGATGATGTGGGTCCGCCAGGCTCCAGGGAAGGGTCTAGAGTGGGTCTCAGGTATTGCGCA
TAATGGTGGGCATACATACTACGCAGACTCCGTGAAGGGCCGGTTCACCATCTCCCGCGACAATTCCAAGAACACGCTG
TATCTGCAAATGAACAGCCTGCGTGCCGAGGACACCGCGGTATATTACTGTGCGAAAGCTGGTCATCCTCAGCAGACTG
AGGCTTTTGACTACTGGGGTCAGGGAACCCTGGTCACCGTCTCGAGC (SEQ ID NO: 667)
BMS3h-54
GAGATGCAGCTGTTGGAGTCTGGGGGAGGCTTGGTACAGCCTGGGGGGTCCCTGCGTCTCTCCTGTGCAGCCTCCGGAT
TCACCTTTGCTACTTATGATATGTATTGGGTCCGCCAGGCTCCAGGGAAGGGTCTAGAGTGGGTCTCAAAGATTTCTCC
GAATGGTTGGAGTACATACTACGCAGACTCCGTGAAGGGCCGGTTCACCATCTCCCGCGACAATTCCAAGAACACGCTG
TATCTGCAAATGAACAGCCTGCGTGCCGAGGACACCGCGGTATATTACTGTGCGAAATATCAGACGCATTTTGACTACT
GGGGTCAGGGAACCCTGGTCACCGTCTCGAGC (SEQ ID NO: 668)
BMS3h-55
GAGGTGCAGCTGTTGGAGTCTGGGGGAGGCTTGGTACAGCCTGGGGGGTCCCTGCGTCTCTCCTGTGCAGCCTCCGGAT
TCACCTTTAGTGTTTATGATATGAGGTGGGTCCGCCAGGCTCCAGGGAAGGGTCTAGAGTGGGTCTCAACGATTTCTTC
TTCGGGTACGTATACATACTACGCAGACTCCGTGAAGGGCCGGTTCACCATCTCCCGCGACAATTCCAAGAACACGCTG
TATCTGCAAATGAACAGCCTGCGTGCCGAGGACACCGCGGTATATTACTGTGCGAAATATCCTAAGAATTTTGACTACT
GGGGTCAGGGAACCCTGGTCACCGTCTCGAGC (SEQ ID NO: 669)
BMS3h-57
GAGGTGCAGCTGTTGGAGTCTGGGGGAGGCTTGGTACAGCCTGGGGGGTCCCTGCGTCTCTCCTGTGCAGCCTCCGGAT
TCACCTTTTCTCATGAGGATATGACTTGGGTCCGCCAGGCTCCAGGGAAGGGTCTAGAGTGGGTCTCAAGTATTAGTCC
GAATGGTTGGGATACATACTACGCAGACTCCGTGAAGGGCCGGTTCACCATCTCCCGCGACAATTCCAAGAACACGCTG
TATCTGCAAATGAACAGCCTGCGTGCCGAGGACACCGCGGTATATTACTGTGCGAAACGTACTAGGAGTAAGTTTGACT
ACTGGGGTCAGGGAACCCTGGTCACCGTCTCGAGC (SEQ ID NO: 670)
BMS3h-58
GAGGTGCAGCTGTTGGAGTCTGGGGGAGGCTTGGTACAGCCTGGGGGGTCCCTGCGTCTCTCCTGTGCAGCCTCCGGAT
TCACCTTTGAGAAGTATATTATGGGTTGGGCCCGCCAGGCTCCAGGGAAGGGTCTAGAGTGGGTCTCAACGATTGATTA
TTGGGGTCAGCATACATACTACGCAGACTCCGTGAAGGGCCGGTTCACTATCTCCCGCGACAATTCCAAGAACACGCTG
TATCTGCAAATGAACAGCCTGCGTGCCGAGGACACCGCGGTATATTACTGTGCGAAACGTAGTCATCTTATTCCTCTGC
AGTTTGACTACTGGGGTCAGGGAACCCTGGTCACCGTCTCGAGC (SEQ ID NO: 671)
BMS3h-59
GAGGTGCAGCTGTTGGAGTCTGGGGGAGGCTTGGTACAGCCTGGGGGGTCCCTGCGTCTCTCCTGTGCAGCCTCCGGAT
TCACCTTTTCTGATTATGCGATGGGGTGGGTCCGCCAGGCTCCAGGGAAGGGTCTGGAGTGGGTCTCAACGATTTCGTA
TGTGGGTTATTATACATACTACGCAGACTCCGTGAAGGGCCGGTTCACCATCTCCCGCGACAATTCCAAGAACACGCTG
TATCTGCAAATGAACAGCCTGCGTGCCGAGGACACCGCGGTATATTACTGTGCGAAAAAGGCTCTGCGGGGGGAGGCGT
TTACGGAGCGTTTTGACTACTGGGGTCAGGGAACCCTGGTCACCGTCTCGAGC (SEQ ID NO: 672)
BMS3h-60
GAGGTGCAGCTGTTGGAGTCTGGGGGAGGCTTGGTACAGCCTGGGGGGTCCCTGCGTCTCTCCTGTGCAGCCTCCGGAT
TCACCTTTGGTCCGTATATGATGCATTGGGTCCGCCAGGCTCCAGGGAAGGGTCTAGAGTGGGTCTCAACGATTGAGGT
TAATGGTAATAGGACATACTACGCAGACTCCGTGAAGGGCCGGTTCACCATCTCCCGCGACAATTCCAAGAACACGCTG
TATCTGCAAATGAACAGCCTGCGTGCCGAGGACACCGCGGTATATTACTGTGCGAAATGGGTTGGTTCGAAGACGTCGT
CGGATAAGAGTTTTGACTACTGGGGTCAGGGAACCCTGGTCACCGTCTCGAGC (SEQ ID NO: 673)
BMS3h-61
GAGGTGCAGCTGTTGGAGTCTGGGGGAGGCTTGGTACAGCCTGGGGGGTCCCTGCGTCTCTCCTGTGCAGCCTCCGGAT
TCACCTTTGGTACGACGGAGATGGCTTGGGTCCGCCAGGCTCCAGGGAAGGGTCTAGAGTGGGTCTCAAGTATTGGTAG
TGCTGGTGCTTGGACATACTACGCAGACTCCGTGAAGGGCCGGTTCACCATCTCCCGCGACAATTCCAAGAACACGCTG
TATCTGCAAATGAACAGCCTGCGTGCCGAGGATACCGCGGTATATTACTGTGCGAAAATTGGTGGGCATCCTCAGGGTC
AGTTTGACTACTGGGGTCAGGGAACCCTGGTCACCGTCTCGAGC (SEQ ID NO: 674)
BMS3h-62
GAGGTGCAGCTGTTGGAGTCTGGGGGAGGCTTGGTACAGCCTGGGGGGTCCCTGCGCCTCTCCTGTGCAGCCTCCGGAT
TCACCTTTCCTAGGGAGTGGATGGCTTGGGTCCGCCAGGCTCCAGGGAAGGGTCTAGAGTGGGTCTCAAGTATTCAGCC
TATGGGTCAGACTACATACTACGCAGACTCCGTGAAGGGCCGGTTCACCATCTCCCGCGACAATTCCAAGAACACGCTG
TATCTGCAAATGAACAGCCTGCGTGCCGAGGATACCGCGGTATATTACTGTGCGAAATATTCTCGGAATAAGGGGTTTT
TTGACTACTGGGGTCAGGGAACCCTGGTCACCGTCTCGAGC (SEQ ID NO: 675)
BMS3h-63
GAGGTGCAGCTGTTGGAGTCTGGGGGAGGCTTGGTACAGCCTGGGGGGTCCCTGCGTCTCTCCTGTGCAGCCTCCGGAT
TCACCTTTACGAGTGAGTATATGGGGTGGGTCCGCCAGGCTCCAGGGAAGGGTCTAGAGTGGGTCTCATCTATTCAGAG
GTATGGTAGTACGACATACTACGCAGACTCCGTGAAGGGCCGGTTCACCATCTCCCGCGACAATTCCAAGAACACGCTG
TATCTGCAAATGAACAGCCTGCGTGCCGAGGATACCGCGGTATATTACTGTGCGAAACATGAGTCTAATTGGGAGACTT
TTGACTACTGGGGTCAGGGAACCCTGGTCACCGTCTCGAGC (SEQ ID NO: 676)
BMS3h-70
GAGGTGCAGCTGTTGGAGTCTGGGGGAGGCTTGGTACAGCCTGGGGGGTCCCTGCGTCTCTCCTGTGCAGCCTCCGGAT
TCACCTTTTCGGTGTATAGTATGCAGTGGGTCCGCCAGGCTCCAGGGAAGGGTCTAGAGTGGGTCTCAGCGATTACTCC
TAATGGTACTCGGACATACTACGCAGACTCCGTGAAGGGCCGGTTCACCATCTCCCGCGACAATTCCAAGAACACGCTG
TATCTGCAAATGAACAGCCTGCGTGCCGAGGACACCGCGGTATATTACTGTGCGAAAACTCTTGGTCGGGGTTCTTATC
CTGGTGTTGATTTTGACTACTGGGGTCAGGGAACCCTGGTCACCGTCTCGAGC (SEQ ID NO: 677)
BMS3h-71
GAGGTGCAGCTGTTGGAGTCTGGGGGAGGCTTGGTACAGCCTGGGGGGTCCCTGCGTCTCTCCTGTGCAGCCTCCGGAT
TCACCTTTCCGAGTTATGCTATGACGTGGGTCCGCCAGGCTCCAGGGAAGGGTCTGGAGTGGGTCTCACGTATTACGGC
GGATGGTACTGTTACATACTACGCAGACTCCGTGAAGGGCCGGTTCACCATCTCCCGCGACAATTCCAAGAACACGCTG
TATCTGCAAATGAACAGCCTGCGTGCCGAGGACACCGCGGTATATTACTGTGCGAAAGGTTCTATTCCGATGCTTACGT
TTGACTACTGGGGTCAGGGAACCCTGGTCACCGTCTCGAGC (SEQ ID NO: 678)
BMS3h-72
GAGGTGCAGCTGTTGGAGTCTGGGGGAGGCTTGGTACAGCCTGGGGGGTCCCTGCGTCTCTCCTGTGCAGCCTCCGGAT
TCACCTTTTCGACTTATGATATGATTTGGGTCCGCCAGGCTCCAGGGAAGGGTCTAGAGTGGGTCTCAGCTATTTCTCC
TAATGGTACTGGTATATACTACGCAGACTCCGTGAAGGGCCGGTTCACCATCTCCCGCGACAATTCCAAGAACACGCTG
TATCTGCAAATGAACAGCCTGCGTGCCGAGGACACCGCGGTATATTACTGTGCGAAAAATCAGAGTGTTCATCATGCTG
TTTTTGACTACTGGGGTCAGGGAACCCTGGTCACCGTCTCGAGC (SEQ ID NO: 679)
BMS3h-73
GAGGTGCAGCTGTTGGAGTCTGGGGGAGGCTTGGTACAGCCTGGGGGGTCCCTGCGTCTCTCCTGTGCAGCCTCCGGAT
TCACCTTTGAGAATTATGAGATGACGTGGGTCCGCCAGGCTCCAGGGAAGGGTCTAGAGTGGGTCTCACGTATTGCGCC
GCATGGTCGGCTTACATACTACGCAGACTCCGTGAAGGGCCGGTTCACCATCTCCCGCGACAATTCCAAGAACACGCTG
TATCTGCAAATGAACAGCCTGCGTGCCGAGGATACCGCGGTATATTACTGTGCGAAAGGTCAGATTCCGATGCTTGATT
TTGACTACTGGGGTCAGGGAACCCTGGTCACCGTCTCGAGC (SEQ ID NO: 680)
BMS3h-74
GAGGTGCAGCTGTTGGAGTCTGGGGGAGGCTTGGTACAGCCTGGGGGGTCCCTGCGTCTCTCCTGTGCAGCCTCCGGAT
TCACCTTTTCGCATTATATGATGATGTGGGTCCGCCAGGCTCCAGGGAAGGGTCTAGAGTGGGTCTCAACGATTTCTCA
TTTTGGTGATATTACATACTACGCAGACTCCGTGAAGGGCCGGTTCACCATCTCCCGCGACAATTCCAAGAACACGCTG
TATCTGCAAATGAACAGCCTGCGTGCCGAGGATACCGCGGTATATTACTGTGCGAAAAATGATATGGTGATGAAGAATG
GGGGGTTTGACTACTGGGGTCAGGGAACCCTGGTCACCGTCTCGAGC (SEQ ID NO: 681)
BMS3h-75
GAGGTGCAGCTGTTGGAGTCTGGGGGAGGCTTGGTACAGCCTGGGGGGTCCCTGCGTCTCTCCTGTGCAGCCTCCGGAT
TCACCTTTGAGAGGTATGATATGAGTTGGGTCCGCCAGGCTCCAGGGAAGGGTCTAGAGTGGGTCTCACGTATTGATTC
GCGGGGTTGGTCTACATACTACGCAGACTCCGTGAAGGGCCGGTTCACCATCTCCCGCGACAATTCCAAGAACACGCTG
TATCTGCAAATGAACAGCCTGCGTGCCGAGGACACCGCGGTATATTACTGTGCGAAAGGGTTGGTGCCGCATCTGAGGT
TTGACTACTGGGGTCAGGGAACCCTGGTCACCGTCTCGAGC (SEQ ID NO: 682)
BMS3h-76
GAGGTGCAGCTGTTGGAGTCTGGGGGAGGCTTGGTACAGCCTGGGGGGTCCCTGCGTCTCTCCTGTGCAGCCTCCGGAT
TCACCTTTGCGAATGCGCAGATGACTTGGGTCCGCCAGGCTCCAGGGAAGGGTCTAGAGTGGGTCTCAAGGATTGATGC
TATGGGTGATGCTACATACTACGCAGACTCCGTGAAGGGCCGGTTCACCATCTCCCGCGACAATTCCAAGAACACGCTG
TATCTGCAAATGAACAGCCTGCGTGCCGAGGACACCGCGGTATATTACTGTGCGAAAGGTAAGGTTCCGAGTATTGACT
ACTGGGGTCAGGGAACCCTGGTCACCGTCTCGAGC (SEQ ID NO: 683)
BMS3h-77
GAGGTGCAGCTGTTGGAGTCTGGGGGAGGCTTGGTACAGCCTGGGGGGTCCCTGCGTCTCTCCTGTGCAGCCTCCGGAT
TCACCTTTGCGAATGCGCAGATGACTTGGGTCCGCCAGGCTCCAGGGAAGGGTCTAGAGTGGGTCTCAAGGATTGATGC
TATGGGTGATGCTACATACTACGCAGACTCCGTGAAGGGCCGGTTCACCATCTCCCGCGACAATTCCAAGAACACGCTG
TATCTGCAAATGAACAGCCTGCGTGCCGAGGATACCGCGGTATATTACTGTGCGAAAGGTGTTATTCCGGCGTTTGACT
ACTGGGGTCAGGGAACCCTGGTCACCGTCTCGAGC (SEQ ID NO: 684)
BMS3h-78
GAGGTGCAGCTGTTGGAGTCTGGGGGAGGCTTGGTACAGCCTGGGGGGTCCCTGCGTCTCTCCTGTGCAGCCTCCGGAT
TCACCTTTCAGAATGATCGGATGCATTGGGTCCGCCAGGCTCCAGGGAAGGGTCTAGAGTGGGTCTCATCGATTTCTGC
TACTGGTGGTGATACATACTACGCAGACTCCGTGAAGGGCCGGTTCACCATCTCCCGCGACAATTCCAAGAACACGCTG
TATCTGCAAATGAACAGCCTGCGTGCCGAGGACACCGCGGTATATTACTGTGCGAAACAGACGGGTACGAATCGTTTTG
ACTACTGGGGTCAGGGAACCCTGGTCACCGTCTCGAGC (SEQ ID NO: 685)
BMS3h-79
GAGGTGCAGCTGTTGGAGTCTGGGGGAGGCTTGGTACAGCCTGGGGGGTCCCTGCGTCTCTCCTGTGCAGCCTCCGGAT
TCACCTTTAATCAGCCTTATATGTCGTGGGTCCGCCAGGCTCCAGGGAAGGGTCTGGAGTGGGTCTCATCTATTGATGC
TTCGGGTGGTACTACATACTACGCAGACTCCGTGAAGGGCCGGTTCACCATCTCCCGCGACAATTCCAAGAACACGCTG
TATCTGCAAATGAACAGCCTGCGTGCCGAGGACGCCGCGGTATATTACTGTGCGAAAGATCGTATTCCTAATCTTGTGT
TTGACTACTGGGGTCAGGGAACCCTGGTCACCGTCTCGAGC (SEQ ID NO: 686)
BMS3h-80
GAGGTGCAGCTGTTGGAGTCTGGGGGAGGCTTGGTACAGCCTGGGGGGTCCCTGCGTCTCTCCTGTGCAGCCTCCGGAT
TCACCTTTGATAATGAGAATATGACTTGGGTCCGCCAGGCTCCAGGGAAGGGTCTAGAGTGGGTCTCACGTATTGATGG
TGGGGGTTATAATACATACTACGCAGACTCCGTGAAGGGCCGGTTCACCATCTCCCGCGACAATTCCAAGAACACGCTG
TATCTGCAAATGAACAGCCTGCGTGCCGAGGACACCGCGGTATATTACTGTGCGAAAGGGCAGGTTCCTGAGCTGCTGT
TTGACTACTGGGGTCAGGGAACCCTGGTCACCGTCTCGAGC (SEQ ID NO: 687)
BMS3h-81
GAGGTGCAGCTGTTGGAGTCTGGGGGAGGCTTGGTACAGCCTGGGGGGTCCCTGCGTCTCTCCTGTGCAGCCTCCGGAT
TCACCTTTGTTTCGTCGAATATGACTTGGGTCCGCCAGGCTCCAGGGAAGGGTCTAGAGTGGGTCTCAGCTATTAGTGG
TAGTGGTGGTAGCACATACTATGCAGACTCCGTGAAGGGCCGGTTCACCATCTCCCGCGACAATTCCAAGAACACGCTG
TATCTGCAAATGAACAGCCTGCGTGCCGAGGACACCGCGGTATATTACTGTGCGAAAGGTCGGATTCCTACGTTGGTGT
TTGACTACTGGGGTCAGGGAACCCTGGTCACCGTCTCGAGC (SEQ ID NO: 688)
BMS3h-82
GAGGTGCAGCTGTTGGAGTCTGGGGGAGGCTTGGTACAGCCTGGGGGGTCCCTGCGTCTCTCCTGTGCAGCCTCCGGAT
TCACCTTTGTTTCGTCGAATATGACTTGGGTCCGCCAGGCTCCAGGGAAGGGTCTAGAGTGGGTCTCAGCTATTAGTGG
TAGTGGTGGTAGCACATACTATGCAGACTCCGTGAAGGGCCGGTTCACCATCTCCCGCGACAATTCCAAGAACACGCTG
TATCTGCAAATGAACAGCCTGCGTGCCGAGGACACCGCGGTATATTACTGTGCGAAAGATCGTATTCCTAATCTTGTGT
TTGACTACTGGGGTCAGGGAACCCTGGTCACCGTCTCGAGC (SEQ ID NO: 689)
BMS3h-83
GAGGTGCAGCTGTTGGAGTCTGGGGGAGGCTTGGTACAGCCTGGGGGGTCCCTGCGTCTCTCCTGTGCAGCCTCCGGAT
TCACCTTTTCTGATGATTCGATGAGTTGGGTCCGCCAGGCTCCAGGGAAGGGTCTAGAGTGGGTCTCACGTATTAATGA
TGCTGGTAGTTCTACATACTACGCAGACTCCGTGAAGGGCCGGTTCACCATCTCCCGCGACAATTCCAAGAACACGCTG
TATCTGCAAATGAACAGCCTGCGTGCCGAGGACACCGCGGTATATTACTGTGCGAAAGGTACTATTCCTCTTCTGGAGT
TTGACTACTGGGGTCAGGGAACCCTGGTCACCGTCTCGAGC (SEQ ID NO: 690)
BMS3h-84
GAGATGCAGCTGTTGGAGTCTGGGGGAGGCTTGGTACAGCCTGGGGGGTCCCTGCGTCTCTCCTGTGCAGCCTCCGGAT
TCACCTTTGTTTCGGATACTATGAGTTGGGTCCGCCAGGCTCCAGGGAAGGGTCTAGAGTGGGTCTCACGTATTGATGG
GACTGGTGGTGATACATACTACGCAGACTCCGTGAAGGGCCGGTTCACCATCTCCCGCGACAATTCCAAGAACACGCTG
TATCTGCAAATGAACAGCCTGCGTGCCGGGGACACCGCGGTATATTACTGTGCGAAAGGGCTTATTCCTGATCTTCAGT
TTGACTACTGGGGTCAGGGAACCCTGGTCACCGTCTCGAGC (SEQ ID NO: 691)
BMS3h-85
GAGGTGCAGCTGTTGGAGTCTGGGGGAGGCTTGGTACAGCCTGGGGGGTCCCTGCGTCTCTCCTGTGCAGCCTCCGGAT
TCACCTTTGATGAGGAGGAGATGACGTGGGTCCGCCAGGCTCCAGGGAAGGGTCTAGAGTGGGTCTCACGTATTATTGG
TGGTGGTCATGAGACATACTACGCAGACTCCGTGAAGGGCCGGTTCACCATCTCCCGCGACAATTCCAAGAACACGCTG
TATCTGCAAATGAACAGCCTGCGTGCCGAGGACACCGCGGTATATTACTGTGCGAAAGGTACTATTCCTCTTCTGGAGT
TTGACTACTGGGGTCAGGGAACCCTGGTCACCGTCTCGAGC (SEQ ID NO: 692)
BMS3h-86
GAGGTGCAGCTGTTGGAGTCTGGGGGAGGCTTGGTACAGCCTGGGGGGTCCCTGCGTCTCTCCTGTGCAGCCTCCGGAT
TCACCTTTGATAATGAGAATATGACTTGGGTCCGCCAGGCTCCAGGGAAGGATCTAGAGTGGGTCTCACGGATTACTGA
GAGGGGTGATGTGACATACTACGCAGACTCCGTGAAGGGCCGGTTCACCATCTCCCGCGACAATTCCAAGAACACGCTG
TATCTGCAAATGAACAGCCTGCGTGCCGAGGACACCGCGGTATATTACTGTGCGAAAGGTACTGTTCCTACGCTGGAGT
TTGACTACTGGGGTCAGGGAACCCTGGTCACCGTCTCGAGC (SEQ ID NO: 693)
BMS3h-87
GAGGTGCAGCTGTTGGAGTCTGGGGGAGGCTTGGTACAGCCTGGGGGGTCCCTGCGTCTCTCCTGTGCAGCCTCCGGAT
TCACCTTTGATGAGGAGGAGATGACGTGGGTCCGCCAGGCTCCAGGGAAGGGTCTAGAGTGGGTCTCACGTATTATTGG
TGGTGGTCATGAGACATACTACGCAGACTCCGTGAAGGGCCGGTTCACCATCTCCCGCGACAATTCCAAGAACACGCTG
TATCTGCAAATGAACAGCCTGCGTGCCGAGGACACCGCGGTATATTACTGTGCGAAAGGTACTGTTCCTACGCTGGAGT
TTGACTACTGGGGTCAGGGAACCCTGGTCACCGTCTCGAGC (SEQ ID NO: 694)
BMS3h-88
GAGGTGCAGCTGTTGGAGTCTGGGGGAGGCTTGGTACAGCCTGGGGGGTCCCTGCGTCTCTCCTGTGCAGCCTCCGGAT
TCACCTTTCATGAGACGGAGATGACGTGGGTCCGCCAGGCTCCAGGGAAGGGTCTAGAGTGGGTCTCAGCTATTAATCG
GCTGGGTCAGGATACATACTACGCAGACTCCGTGAAGGGCCGGTTCACCATCTCCCGCGACAATTCCAAGAACACGCTG
TATCTGCAAATGAACAGCCTGCGTGCCGAGGACACCGCGGTATATTACTGTGCGAAAGGTAGGATTCCTGGGCTGGTTT
TTGACTACTGGGGTCAGGGAACCCTGGTCACCGTCTCGAGC (SEQ ID NO: 695)
BMS3h-89
GAGGTGCAGCTGTTGGAGTCTGGGGGAGGCTTGGTACAGCCTGGGGGGTCCCTGCGTCTCTCCTGTGCAGCCTCCGGAT
TCACCTTTTCTGATGATTCGATGAGTTGGGTCCGCCAGGCTCCAGGGAAGGGTCTAGAGTGGGTCTCACGTATTAATGA
TGCTGGTAGTTCTACATACTACGCAGACTCCGTGAAGGGCCGGTTCACCATCTCCCGCGACAATTCCAAGAACACGCTG
TATCTGCAAATGAACAGCCTGCGTGCCGAGGACACCGCGGTATATTACTGTGCGAAAGGTACTGTTCCTACGCTGGAGT
TTGACTACTGGGGTCAGGGAACCCTGGTCACCGTCTCGAGC (SEQ ID NO: 696)
BMS3h-90
GAGGTGCAGCTGTTGGAGTCTGGGGGAGGCTTGGTACAGCCTGGGGGGTCCCTGCGTCTCTCCTGTGCAGCCTCCGGAT
TCACCTTTGATAATGAGAATATGACTTGGGTCCGCCAGGCTCCAGGGAAGGATCTAGAGTGGGTCTCACGGATTACTGA
GAGGGGTGATGTGACATACTACGCAGACTCCGTGAAGGGCCGGTTCACCATCTCCCGCGACAATTCCAAGAACACGCTG
TATCTGCAAATGAACAGCCTGCGTGCCGAGGACACCGCGGTATATTACTGTGCGAAAGGTCGGATTCCTACGTTGGTGT
TTGACTACTGGGGTCAGGGAACCCTGGTCACCGTCTCGAGC (SEQ ID NO: 697)
BMS3h-91
GAGGTGCAGCTGTTGGAGTCTGGGGGAGGCTTGGTACAGCCTGGGGGGTCCCTGCGTCTCTCCTGTGCAGCCTCCGGAT
TCACCTTTTCTGATGATTCGATGAGTTGGGTCCGCCAGGCTCCAGGGAAGGGTCTAGAGTGGGTCTCACGTATTAATGA
TGCTGGTAGTTCTACATACTACGCAGACTCCGTGAAGGGCCGGTTCACCATCTCCCGCGACAATTCCAAGAACACGCTG
TATCTGCAAATGAACAGCCTGCGTGCCGAGGACACCGCGGTATATTACTGTGCGAAAGGGATTACTCCTAATTTGACTT
TTGACTACTGGGGTCAGGGAACCCTGGTCACCGTCTCGAGC (SEQ ID NO: 698)
BMS3h-92
GAGGTGCAGCTGTTGGAGTCTGGGGGAGGCTTGGTACAGCCTGGGGGGTCCCTGCGTCTCTCCTGTGCAGCCTCCGGAT
TCACCTTTGCTGATGAGCCGATGACTTGGGTCCGCCAGGCTCCAGGGAAGGGTCTAGAGTGGGTCTCACGTATTCCTCC
TGAGGGTGCTCCGACATACTACGCAGACTCCGTGAAGGGCCGGTTCACCATCTCCCGCGACAATTCCAAGAACACGCTG
TATCTGCAAATGAACAGCCTGCGTGCCGAGGACACCGCGGTATATTACTGTGCGAAAGGGCTTATTCCTGATCTTCAGT
TTGACTACTGGGGTCAGGGAACCCTGGTCACCGTCTCGAGC (SEQ ID NO: 699)
BMS3h-93
GAGGTGCAGCTGTTGGAGTCTGGGGGAGGCTTGGTACAGCCTGGGGGGTCCCTGCGTCTCTCCTGTGCAGCCTCCGGAT
TCACCTTTCAGGATAGTGATATGACGTGGGTCCGCCAGGCTCCAGGGAAGGGTCTAGAGTGGGTCTCAGCTATTGCTGC
GCCTGGTGGTAGTACATACTACGCAGACTCCGTGAAGGGCCGGTTCACCATCTCCCGCGACAATTCCAAGAACACGCTG
TATCTGCAAATGAACAGCCTGCGTGCCGAGGACACCGCGGTATATTACTGTGCGAAAGATCGTATTCCTAATCTTAGGT
TTGACTACTGGGGTCAGGGAACCCTGGTCACCGTCTCGAGC (SEQ ID NO: 700)
BMS3h-94
GAGGTGCAGCTGTTGGAGTCTGGGGGAGGCTTGGTACAGCCTGGGGGGTCCCTGCGTCTCTCCTGTGCAGCCTCCGGAT
TCACCTTTGTTTCGGATACTATGAGTTGGGTCCGCCAGGCTCCAGGGAAGGGTCTAGAGTGGGTCTCACGTATTGATGG
GACTGGTGGTGATACATACTACGCAGACTCCGTGAAGGGCCGGTTCACCATCTCCCGCGACAATTCCAAGAACACGCTG
TATCTGCAAATGAACAGCCTGCGTGCCGAGGACACCGCGGTATATTACTGTGCGAAAGGGCAGGTTCCTGAGCTGCTGT
TTGACTACTGGGGTCAGGGAACCCTGGTCACCGTCTCGAGC (SEQ ID NO: 701)
BMS3h-95
GAGGTGCAGCTGTTGGAGTCTGGGGGAGGCTTGGTACAGCCTGGGGGGTCCCTGCGTCTCTCCTGTGCAGCCTCCGGAT
TCACCTTTCAGGATAGTGATATGACGTGGGTCCGCCAGGCTCCAGGGAAGGGTCTAGAGTGGGTCTCAGCTATTGCTGC
GCCTGGTGGTAGTACATACTACGCAGACTCCGTGAAGGGCCGGTTCACCATCTCCCGCGACAATTCCAAGAACACGCTG
TATCTGCAAATGAACAGCCTGCGTGCCGAGGATACCGCGGTATATTACTGTGCGAAAGATCGTATTCCTAATCTTGTGT
TTGACTACTGGGGTCAGGGAACCCTGGTCACCGTCTCGAGC (SEQ ID NO: 702)
BMS3h-96
GAGGTGCAGCTGTTGGAGTCTGGGGGAGGCTTGGTACAGCCTGGGGGGTCCCTGCGTCTCTCCTGTGCAGCCGCCGGAT
TCACCTTTGATCTGGCGGAGATGACTTGGGTCCGCCAGGCTCCAGGGAAGGGTCTAGAGTGGGTCTCACGTATTGATGA
GGATGGTGCTTCTACATACTACGCAGACTCCGTGAAGGGCCGGTTCACCATCTCCCGCGACAATTCCAAGAACACGCTG
TATCTGCAAATGAACAGCCTGCGTGCCGAGGACGCCGCGGTATATTACTGTGCGGAAGGTGTTATTCCGTCTCTGACTT
TTGACTACTGGGGTCAGGGAACCCTGGTCACCGTCTCGAGC (SEQ ID NO: 703)
BMS3h-97
GAGGTGCAGCTGTTGGAGTCTGGGGGAGGCTTGGTACAGCCTGGGGGGTCCCTGCGTCTCTCCTGTGCAGCCTCCGGAT
TCACCTTTACTGATAAGCATATGAGTTGGGTCCGCCAGGCTCCAGGGAAGGGTCTAGAGTGGGTCTCACGGATTTCGCC
TGATGGTACGTATACATACTACGCAGACTCCGTGAAGGGCCGGTTCACCATCTCCCGCGACAATTCCAAGAACACGCTG
TATCTGCAAATGAACAGCCTGCGTGCCGAGGACGCCGCGGTATATTACTGTGCGGAAGGTGTTATTCCGTCTCTGACTT
TTGACTACTGGGGTCAGGGAACCCTGGTCACCGTCTCGAGC (SEQ ID NO: 704)
BMS3h-98
GAGGTGCAGCTGTTGGAGTCTGGGGGAGGCTTGGTACAGCCTGGGGGGTCCCTGCGTCTCTCCTGTGCAGCCTCCGGAT
TCACCTTTGCTGAGGATGATATGACTTGGGTCCGCCAGGCTCCAGGGAAGGGTCTAGAGTGGGTCTCACGTATTGCGGT
TGATGGTGATCGGACATACTACGCAGACTCCGTGAAGGGCCGGTTCACCATCTCCCGCGACAATTCCAAGAACACGCTG
TATCTGCAAATGAACAGCCTGCGTACCGAGGACACCGCGGTATATTACTGTGCGAAAGGGAAGACGCCGCATCTTGTGT
TTGACTACTGGGGTCAGGGAACCCTGGTCACCGTCTCGAGC (SEQ ID NO: 705)
BMS3h-99
GAGGTGCAGCTGTTGGAGTCTGGGGGAGGCTTGGTACAGCCTGGGGGGTCCCTGCGTCTCTCCTGTGCAGCCGCCGGAT
TCACCTTTGATCTGGCGGAGATGACTTGGGTCCGCCAGGCTCCAGGGAAGGGTCTAGAGTGGGTCTCACGTATTGATGA
GGATGGTGCTTCTACATACTACGCAGACTCCGTGAAGGGCCGGTTCACCATCTCCCGCGACAATTCCAAGAACACGCTG
TATCTGCAAATGAACAGCCTGCGTGCCGAGGACACCGCGGTATATTACTGTGCGAAAGGTCAGGTTCCTGCTTTGGTTT
TTGACTACTGGGGTCAGGGAACCCTGGTCACCGTCTCGAGC (SEQ ID NO: 706)
BMS3h-100
GAGGTGCAGCTGTTGGAGTCTGGGGGAGGCTTGGTACAGCCTGGGGGGTCCCTGCGTCTCTCCTGTGCAGCCTCCGGAT
TCACCTTTGAGGATTCGATGATGTCGTGGGTCCGCCAGGCGCCAGGGAAGGGTCTAGAGTGGGTCTCACGGATTGATCC
TGGGGGTGCTCAGACATACTACGCAGACTCCGTGAAGGGCCGGTTCACCATCTCCCGCGACAATTCCAAGAACACGCTG
TATCTGCAAATGAACAGCCTGCGTGCCGAGGACACCGCGGTATATTACTGTGCGAAAGGGGTGACTCCGGATTTGACTT
TTGACTACTGGGGTCAGGGAACCCTGGTCACCGTCTCGAGC (SEQ ID NO: 707)
BMS3h-101
GAGGTGCAGCTGTTGGAGTCTGGGGGAGGCTTGGTACAGCCTGGGGGGTCCCTGCGTCTCTCCTGTGCAGCCTCCGGAT
TCACCTTTGAGCATGCGGATATGAGTTGGGTCCGCCAGGCTTCAGGGAAGGGTCTAGAGTGGGTCTCACGTATTGATAA
TAGTGGTCAGTCTACATACTACGCAGACTCCGTGAAGGGCCGGTTCACCATCTCCCGCGACAATTCCAAGAACACGCTG
TATCTGCAAATGAACAGCCTGCGTGCCGAGGACACCGCGGTATATTACTGTGCGAAAGGGGTGACTCCGGATTTGACGT
TTGACTACTGGGGTCAGGGAACCCTGGTCACCGTCTCGAGC (SEQ ID NO: 708)
BMS3h-102
GAGGTGCAGCTGTTGGAGTCTGGGGGAGGCTTGGTACAGCCTGGGGGGTCCCTGCGTCTCTCCTGTGCAGCCTCCGGAT
TCACCTTTAGTGAGGCGGAGATGAATTGGGTCCGCCAGGCTCCAGGGAAGGGTCTAGAGTGGGTCTCACGTATTACGAC
GGATGGTGATTCTACATACTACGCAGACTCCGTGAAGGGCCGGTTCACCATCTCCCGCGACAATTCCAAGAACACGCTG
TATCTGCAAATGAACAGCCTGCGTGCCGAGGACACCGCGGTATATTACTGTGCGAAAGGGCGTATTCCTACTCTTCATT
TTGACTACTGGGGTCAGGGAACCCTGGTCACCGTCTCGAGC (SEQ ID NO: 709)
BMS3h-103
GAGGTGCAGCTGTTGGAGTCTGGGGGAGGCTTGGTACAGCCTGGGGGGTCCCTGCGTCTCTCCTGTGCAGCCTCAGGAT
TCACCTTTGATGATAGTGATATGACTTGGGTCCGCCAGGCTCCAGGGAAGAGTCTAGAGTGGGTCTCATATATTCGGGG
TGATGATGATGAGACATACTACGCAGACTCCGTGAAGGGCCGGTTCACCATCTCCCGCGACAATTCCAAGAACACGCTG
TATCTGCAAATGAACAGCCTGCGTGCCGAGGACACCGCGGTATATTACTGTGCGAAAAATCGGATTCCTGATCTTGTGT
TTGACTACTGGGGTCAGGGAACCCTGGTCACCGTCTCGAGC (SEQ ID NO: 710)
BMS3h-108
GAGGTGCAGCTGTTGGAGTCTGGGGGAGGCTTGGTACAGCCTGGGGGGTCCCTGCGTCTCTCCTGTGCAGCCTCCGGAT
TCACCTTTAATGTGGCGGATATGCAGTGGGTCCGCCAGGCTCCAGGGAAGGGTCTAGAGTGGGTCTCAAGTATTAGTCC
GAATGGTTGGGATACATACTACGCAGACTCCGTGAAGGGCCGGTTCACCATCTCCCGCGACAATTCCAAGAACACGCTG
TATCTGCAAATGAACAGCCTGCGTGCCGAGGACACCGCGGTATATTACTGTGCGAAACATGCTTCTACGGAGGGGCCGA
CTGCTTTTGACTACTGGGGTCAGGGAACCCTGGTCACCGTCTCGAGC (SEQ ID NO: 711)
BMS3h-109
GAGGTGCAGCTGTTGGAGTCTGGGGGAGGCTTGGTACAGCCTGGGGGGTCCCTGCGTCTCTCCTGTGCAGCCTCCGGAT
TCACCTTTGGGCCGTATGATATGGGGTGGGTCCGCCAGGCTCCAGGGAAGGGTCTGGAGTGGGTCTCATGGATTTCTGC
TCATGGTTCGTTTACATACTACGCAGACTCCGTGAAGGGCCGGTTCACCATCTCCCGCGACAATTCCAAGAACACGCTG
TATCTGCAAATGAACAGCCTGCGTGCCGAGGATACCGCGGTATATTACTGTGCGAAATGGCCTTATAAGTTTGACTACT
GGGGTCAGGGAACCCTGGTCACCGTCTCGAGC (SEQ ID NO: 712)
BMS3h-110
GAGGTGCAGCTGTTGGAGTCTGGGGGAGGCTTGGTACAGCCTGGGGGGTCCCTGCGTCTCTCCTGTGCAGCCTCCGGAT
TCACCTTTGGGAGTGGGTCTATGAGTTGGGTCCGCCAGGCTCCAGGGAAGGGTCTAGAGTGGGTCTCACGGATTGGTAG
TAATGGTGCGGATACATACTACGCAGACTCCGTGAAGGGCCGGTTCACCATCTCCCGCGACAATTCCAAGAACACGCTG
TATCTGCAAATGAACAGCCTGCGTGCCGAGGACACCGCGGTATATTACTGTGCGAAAGGGATGGTTCCTAATTTGGTTT
TTGACTACTGGGGTCAGGGAACCCTGGTCACCGTCTCGAGC (SEQ ID NO: 713)
BMS3h-111
GAGGTGCAGCTGTTGGAGTCTGGGGGAGGCTTGGTACAGCCTGGGGGGTCCCTGCGTCTCTCCTGTGCAGCCTCCGGAT
TCACCTTTAATCGTTTTGATATGACGTGGGTCCGCCAGGCTCCAGGGAAGGGTCTAGAGTGGGTCTCAGCTATTAGTGG
TAGTGGTGGTAGCACATACTACGCAGACTCCGTGAAGGGCCGGTTCACCATCTCCCGCGACAATTCCAAGAACACGCTG
TATCTGCAAATGAACAGCCTGCGTGCCGAGGACACCGCGGTATATTACTGTGCGAAAGATCGTATTCCTAATCTTGTGT
TTGACTACTGGGGTCAGGGAACCCTGGTCACCGTCTCGAGC (SEQ ID NO: 714)
BMS3h-112
GAGGTGCAGCTGTTGGAGTCTGGGGGAGGCTTGGTACAGCCTGGGGGGTCCCTGCGTCTCTCCTGTGCAGCCTCCGGAT
TCACCTTTGGGGAGAGTGATATGAAGTGGGTCCGCCAGGCTCCAGGGAAGGGTCTAGAGTGGGTCTCAAGTATTAGTCC
GAATGGTTGGGATACATACTACGCAGACTCCGTGAAGGGCCGGTTCACCATCTCCCGCGACAATTCCAAGAACACGCTG
TATCTGCAAATGAACAGCCTGCGTGCCGAGGACACCGCGGTATATTACTGTGCGAAATCTCCTTCTTCTCGTCTTAAGT
TTGACTACTGGGGTCAGGGAACCCTGGTCACCGTCTCGAGC (SEQ ID NO: 715)
BMS3h-139
GAGGTGCAGCTGTTGGAGTCTGGGGGAGGCTTGGTACAGCCTGGGGGGTCCCTGCGTCTCTCCTGTGCAGCCTCCGGAT
TCACCTTTGATAGTAGTGAGATGAGTTGGGTCCGCCAGGCTCCAGGGAAGGGTCTAGAGTGGGTCTCATCGATTGAGAA
TCAGGGTGGTGCGACATACTACGCAGACTCCGTGAAGGGCCGGTTCACCATCTCCCGCGACAATTCCAAGAACACGCTG
TATCTGCAAATGAACAGCCTGCGTGCCGAGGATACCGCGGTATATTACTGTGCGAAAGATCGTATTCCTAATCTTGTGT
TTGACTACTGGGGTCAGGGAACCCTGGTCACCGTCTCGAGC (SEQ ID NO: 716)
BMS3h-140
GAGGTGCAGCTGTTGGAGTCTGGGGGAGGCTTGGTACAGCCTGGGGGGTCCCTGCGTCTCTCCTGTGCAGCCTCCGGAT
TCACCCTTGATGCGTATCCTATGTATTGGGTCCGCCAGGCTCCAGGGAAGGGTCTAGAGTGGGTCTCATGGATTGCTTC
GGGTGGTGGTGCGACATACTACGCAGACTCCGTGAAGGGCCGGTTCACCATCTCCCGCGACAATTCCAAGAACACGCTG
TATCTGCAAATGAACAGCCTGCGTGCCGAGGACACCGCGGTATATTACTGTGCGAAACGTACGAAGAATTTTGACTACT
GGGGTCAGGGAACCCTGGTCACCGTCTCGAGC (SEQ ID NO: 717)
BMS3h-141
GAGGTGCAGCTGTTGGAGTCTGGGGGAGGCTTGGTACAGCCTGGGGGGTCCCTGCGTCTCTCCTGTGCAGCCTCCGGAT
TCACCTTTATGAGTTATTCTATGGCTTGGGTCCGCCAGGCTCCAGGGAAGGGTCTAGAGTGGGTCTCAGGGATTACTTC
TAATGGTAATCGGACATACTACGCAGACTCCGTGAAGGGCCGGTTCACCATCTCCCGCGACAATTCCAAGAACACGCTG
TATCTGCAAATGAACAGCCTGCGTGCCGAGGATACCGCGGTATATTACTGTGCGAAATCGACTGGGGCTAATAGTAGGA
ATTTTGACTACTGGGGTCAGGGAACCCTGGTCACCGTCTCGAGC (SEQ ID NO: 718)
BMS3h-142
GAGGTGCAGCTGTTGGAGTCTGGGGGAGGCTTGGTACAGCCTGGGGGGTCCCTGCGTCTCTCCTGTGCAGCCTCCGGAT
TCACCTTTGAGGGGTATCTGATGTCGTGGGTCCGCCAGGCTCCAGGGAAGGGTCTAGAGTGGGTCTCAAGTATTGCGGC
TAATGGTATGCAGACATACTACGCAGACTCCGTGAAGGGCCGGTTCACCATCTCCCGCGACAATTCCAAGAACACGCTG
TATCTGCAAATGAACAGCCTGCGTGCCGAGGACACCGCGGTATATTACTGTGCGAAAAAGCCGAGGGGTATTTGGGATG
GGGATTTTGACTACTGGGGTCAGGGAACCCTGGTCACCGTCTCGAGC (SEQ ID NO: 719)
BMS3h-143
GAGGTGCAGCTGTTGGAGTCTGGGGGAGGCTTGGTACAGCCTGGGGGGTCCCTGCGTCTCTCCTGTGCAGCCTCCGGAT
TCACCTTTCATGAGTCTACGATGACGTGGGTCCGCCAGGCTCCAGGGAAGGGTCTAGAGTGGGTCTCAACTATTCGGCA
TCCGGGTGAGTTTACATACTACGCAGACTCCGTGAAGGGCCGGTTCACCATCTCCCGCGACAATTCCAAGAACACGCTG
TATCTGCAAATGAACAGCCTGCGTGCCGGGGACACCGCGGTATATTACTGTGCGAAAGGGCTTATTCCTGATCTTCAGT
TTGACTACTGGGGTCAGGGAACCCTGGTCACCGTCTCGAGC (SEQ ID NO: 720)
BMS3h-144
GAGGTGCAGCTGTTGGAGTCTGGGGGAGGCTTGGTACAGCCTGGGGGGTCCCTGCGTCTCTCCTGTGCAGCCTCCGGAT
TCACCTTTGCGATGTATAGTATGAGTTGGGTCCGCCAGGCTCCAGGGAAGGGTCTAGAGTGGGTCTCATCGATTGCGCC
GCCGGGTGGTAGGACATACTACGCAGACTCCGTGAAGGGCCGGTTCACCATCTCCCGCGACAATTCCAAGAACACGCTG
TATCTGCAAATGAACAGCCTGCGTGCCGAGGATACCGCGGTATATTACTGTGCGAAACAGTCGCTGACGGGGTATAGTA
GGTCTTTTGACTACTGGGGTCAGGGAACCCTGGTCACCGTCTCGAGC (SEQ ID NO: 721)
BMS3h-145
GAGGTGCAGCTGTTGGAGTCTGGGGGAGGCTTGGTACAGCCTGGGGGGTCCCTGCGTCTCTCCTGTGCAGCCTCCGGAT
TCACCTTTTCGCAGAATCCGATGTCGTGGGTCCGCCACGCTCCAGGGAAGGGTCTAGAGTGGGTCTCAACGATTCCTGC
GAATGGTCGTCCTACATCCTACGCAGACTCCGTGAAGGGCCGGTTCACCATCTCCCGCGACAATTCCAAGAACACGCTG
TATCTGCAAATGAACAGCCTGCGTGCCGAGGATACCGCGGTATATTACTGTGCGAAATATAGTCAGCAGCCGGGTCGTC
GGTTTGACTACTGGGGTCAGGGAACCCTGGTCACCGTCTCGAGC (SEQ ID NO: 722)
BMS3h-146
GAGGTGCAGCTGTTGGAGTCTGGGGGAGGCTTGGTACAGCCTGGGGGGTCCCTGCGTCTCTCCTGTGCAGCCTCCGGAT
TCACCTTTGCTAATTATCATATGACGTGGGTCCGCCAGGCTCCAGGGAAGGGTCTAGAGTGGGTCTCATCGATTCCTGA
TAGTGGTAAGCAGACATACTACGCAGACTCCGTGAAGGGCCGGTTCACCATCTCCCGCGACAATTCCAAGAACACGCTG
TATCTACAAATGAACAGCCTGCGTGCCGAGGACACCGCGGTATATTACTGTGCGAAAGGTAGGATTCCGTCTCTTCTTT
TTGACTACTGGGGTCAGGGAACCCTGGTCACCGTCTCGAGC (SEQ ID NO: 723)
BMS3h-147
GAGGTGCAGCTGTTGGAGTCTGGGGGAGGCTTGGTACAGCCTGGGGGGTCCCTGCGTCTCTCCTGTGCAGCCTCCGGAT
TCACCTTTGCGCAGTATCATATGCGTTGGGTCCGCCAGGCTCCAGGGAAGGGTCTAGAGTGGGTCTCAACGATTAATGA
TATTGGTAGTAATACATACTACGCAGACTCCGTGAAGGGCCGGTTCACCATCTCCCGCGACAATTCCAAGAACACGCTG
TATCTGCAAATGAACAGCCTGCGTGCCGAGGACACCGCGGTATATTACTGTGCGAAAGTTGGGGGGCGGGGGAGTTTTT
CTTTTGACTACTGGGGTCAGGGAACCCTGGTCACCGTCTCGAGC (SEQ ID NO: 724)
BMS3h-148
GAGGTGCAGCTGTTGGAGTCTGGGGGAGGCTTGGTACAGCCTGGGGGGTCCCTGCGTCTCTCCTGTGCAGCCTCCGGAT
TCACCTTTTCTTCGTATGATATGAAGTGGGTCCGCCAGGCTCCAGGGAAGGGTCTAGAGTGGGTCTCAACGATTAGTGC
GTCTGGTGTGTTTACATACTACGCAGACTCCGTGAAGGGCCGGTTCACCATCTCCCGCGACAATTCCAAGAACACGCTG
TATCTGCAAATGAACAGCCTGCGTGCCGAGGACACCGCGGTATATTACTGTGCGAAACGGGAGCATGCGGGTCAGCCGC
CTTTTGACTACTGGGGTCAGGGAACCCTGGTCACCGTCTCGAGC (SEQ ID NO: 725)
BMS3h-149
GAGGTGCAGCTGTTGGAGTCTGGGGGAGGCTTGGTACAGCCTGGGGGGTCCCTGCGTCTCTCCTGTGCAGCCTCCGGAT
TCACCTTTAATGGTTATGCTATGAGTTGGGTCCGCCAGGCTCCAGGGAAGGGTCTAGAGTGGGTCTCAACTATTAATGC
TAATGGTAAGTATACATACTACGCAGACTCCGTGAAGGGCCGGTTCACCATCTCCCGCGACAATTCCAAGAACACGCTG
TATCTGCAAATGAACAGCCTGCGTGCCGAGGACACCGCGGTATATTACTGTGCGAAAAAGTTGACTCTTGCTTCTAATT
ATTTTGACTACTGGGGTCAGGGAACCCTGGTCACCGTCTCGAGC (SEQ ID NO: 726)
BMS3h-150
GAGGTGCAGCTGTTGGAGTCTGGGGGAGGCTTGGTACAGCCTGGGGGGTCCCTGCGTCTCTCCTGTGCAGCCTCCGGAT
TCACCTTTATGGATTATGATATGAAGTGGGTCCGCCAGGCTCCAGGGAAGGGTCTAGAGTGGGTCTCAAGTATTACTGC
GCTTGGTAAGAAGACATACTACGCAGACTCCGTGAAGGGCCGGTTCACCATCTCCCGCGACAATTCCAAGAACACGCTG
TATCTGCAAATGAACAGCCTGCGTGCCGAGGACACCGCGGTATATTACTGTGCGAAAGATAGTGTTAAGTATCCTCTTA
ATCTTTTTGACTACTGGGGTCAGGGAACCCTGGTCACCGTCTCGAGC (SEQ ID NO: 727)
BMS3h-151
GAGGTGCAGCTGTTGGAGTCTGGGGGAGGCTTGGTACAGCCTGGGGGGTCCCTGCGTCTCTCCTGTGCAGCCTCCGGAT
TCACCTTTCCGCATTATACGATGGCGTGGGTCCGCCAGGCTCCAGGGAAGGGTCTGGAGTGGGTCTCATCTATTCAGTC
GCCTGGTTGGCGGACATACTACGCAGACTCCGTGAAGGGCCGGTTCACCATCTCCCGCGACAATTCCAAGAACACGCTG
TATCTGCAAATGAACAGCCTGCGTGCCGAGGATACCGCGGTATATTACTGTGCGAAATATGGGGATGGTCTTCCTTTGA
CTTTTGACTACTGGGGTCAGGGAACCCTGGTCACCGTCTCGAGC (SEQ ID NO: 728)
BMS3h-167
GAGGTGCAGCTGTTGGAGTCTGGGGGAGGCTTGGTACAGCCTGGGGGGTCCCTGCGTCTCTCCTGTGCAGCCTCCGGAT
TCACCTTTAGTGGTACGCCGATGTCTTGGGTCCGCCAGGCTCCAGGGAAGGGTCTAGAGTGGGTCTCACGTATTGGGGA
TGAGGGTCAGGAGACATACTACGCAGACTCCGTGAAGGGCCGGTTCACCATCTCCCGCGACAATTCCAAGAACACGCTG
TATCTGCAAATGAACAGCCTGCGTGCCGAGGACACCGCGGTATATTACTGTGCGAAAGGGGTGACTCCGGATTTGACTT
TTGACTACTGGGGTCAGGGAACCCTGGTCACCGTCTCGAGC (SEQ ID NO: 729)
BMS3h-168
GAGGTGCAGCTGTTGGAGTCTGGGGGAGGCTTGGTACAGCCTGGGGGGTCCCTGCGTCTCTCCTGTGCAGCCTCCGGAT
TCACCTTTAGTAGTAGTTCGATGTCTTGGGTCCGCCAGGCTCCAGGGAAGGGTCTAGAGTGGGTCTCAGCGATTGGGTC
TGATGGTCCGAGTACATACTACGCAGACTCCGTGAAGGGCCGGTTCACCATCTCCCGCGACAATTCCAAGAACACGCTG
TATCTGCAAATGAACAGCCTGCGTGCCGAGGACACCGCGGTATATTACTGTGCGAAAGGGCGTATTCCTACTCTTCATT
TTGACTACTGGGGTCAGGGAACCCTGGTCACCGTCTCGAGC (SEQ ID NO: 730)
BMS3h-169
GAGGTGCAGCTGTTGGAGTCTGGGGGAGGCTTGGTACAGCCTGGGGGGTCCCTGCGTCTCTCCTGTGCAGCCTCCGGAT
TCACCTTTAATCCTGGTGAGATGACGTGGGTCCGCCAGGCTCCAGGGAAGGGTCTAGAGTGGGTCTCAAGTATTGATGG
GTCTGGTTCTTCGACATACTACGCAGACTCCGTGAAGGGCCGGTTCACCATCTCCCGCGACAATTCCAAGAACACGCTG
TATCTGCAAATGAACAGCCTGCGTGCCGATGACACCGCGGTATATTACTGTGCGAAAGGGCGTATTCCTACTCTTCATT
TTGACTACTGGGGTCAGGGAACCCTGGTCACCGTCTCGAGC (SEQ ID NO: 731)
BMS3h-170
GAGGTGCAGCTGTTGGAGTCTGGGGGAGGCTTGGTACAGCCTGGGGGGTCCCTGCGTCTCTCCTGTGCAGCCTCCGGAT
TCACCTTTCCTGAGTCTATGATGGGGTGGGTCCGCCAGGCTCCAGGGAAGGGTCTAGAGTGGGTCTCATCGATTGGGTA
TCCTGGTGCTACTACATACTACGCAGACTCCGTGAAGGGCCGGTTCACCATCTCCCGCGACAATTCCAAGAACACGCTG
TATCTGCAAATGAACAGCCTGCGTGCCGAGGATACCGCGGTATATTACTGTGCGAAAGGTGGTAGTCGGGATGATAATT
TTGACTACTGGGGTCAGGGAACCCTGGTCACCGTCTCGAGC (SEQ ID NO: 732)
BMS3h-171
GAGGTGCAGCTGTTGGAGTCTGGGGGAGGCTTGGTACAGCCTGGGGGGTCCCTGCGCCTCTCCTGTGCAGCCTCCGGAT
TCACCTTTGGTCAGCATAGTATGCATTGGGTCCGCCAGGCTCCAGGGAAGGGTCTAGAGTGGGTCTCAAGTATTAGTGT
TCCGGGTCCGAAGACATACTACGCAGACTCCGTGAAGGGCCGGTTCACCATCTCCCGCGACAATTCCAAGAACACGCTG
TATCTGCAAATGAACAGCCTGCGTGCCGAGGACACCGCGGTATATTACTGTGCGAAAAGTCTTAGGGATTTGCGTCCGG
GTGATAGTAAGAGTTTTGACTACTGGGGTCAGGGAACCCTGGTCACCGTCTCGAGC (SEQ ID NO: 733)
BMS3h-197
GAGGTGCAGCTGTTGGAGTCTGGGGGAGGCTTGGTACAGCCTGGGGGGTCCCTGCGTCTCTCCTGTGCAGCCTCCGGAT
TCACCTTTGGTTCTGCTGCTATGGATTGGGTCCGCCAGGCTCCAGGGAAGGGTCTAGAGTGGGTCTCATCTATTAATGA
TATGGGTTCTAATACATACTACGCAGACTCCGTGAAGGGCCGGTTCACCATCTCCCGCGACAATTCCAAGAACACGCTG
TATCTGCAAATGAACAGCCTGCGTGCCGAGGACACCGCGGTATATTACTGTGCGAAACAGGGTGGTCGTTTTGACTACT
GGGGTCAGGGAACCCTGGTCACCGTCTCGAGC (SEQ ID NO: 734)
BMS3h-199
GAGGTGCAGCTGTTGGAGTCTGGGGGAGGCTTGGTACAGCCTGGGGGGTCCCTGCGTCTCTCCTGTGCAGCCTCCGGAT
TCACCTTTGGTTATGATAGGATGGCTTGGGTCCGCCAGGCTCCAGGGAAGGGTCTAGAGTGGGTCTCATCGATTGATGG
TCCTGGTGGGGCTACATACTACGCAGACTCCGTGAAGGGCCGGTTCACCATCTCCCGCGACAATTCCAAGAACACGCTG
TATCTGCAAATGAACAGCCTGCGTGCCGAGGACACCGCGGTATATTACTGTGCGGAAGGGAGGAGGGTTCCTGATTTTG
ACTACTGGGGTCAGGGAACCCTGGTCACCGTCTCGAGC (SEQ ID NO: 735)
BMS3h-200
GAGGTGCAGCTGTTGGAGTCTGGGGGAGGCTTGGTACAGCCTGGGGGGTCCCTGCGTCTCTCCTGTGCAGCCTCCGGAT
TCACCTTTGGTGAGTATGAGATGACTTGGGTCCGCCAGGCTCCAGGGAAGGGTCTAGAGTGGGTCTCAAGGATTGATCC
GTTTGGTTCTGAGACATACTACGCAGACTCCGTGAAGGGCCGGTTCACCATCTCCCGCGACAATTCCAAGAACACGCTG
TATCTGCAAATGAACAGCCTGCGTGCCGAGGACACCGCGGTATATTACTGTGCGGAAGGTGTGGTTCCTGATTTGAATT
TTGACTACTGGGGTCAGGGAACCCTGGTCACCGTCTCGAGC (SEQ ID NO: 736)
BMS3h-201
GAGGTGCAGCTGTTGGAGTCTGGGGGAGGCTTGGTACAGCCTGGGGGGTCCCTGCGTCTCTCCTGTGCAGCCTCCGGAT
TCACCTTTGATAAGTATGTTATGGGGTGGGTCCGCCAGGCTCCAGGGAAGGGTCTAGAGTGGGTCTCAACTATTGGTAG
TTATGGTGGGGCTACATACTACGCAGACTCCGTGAAGGGCCGGTTCACCATCTCCCGCGACAATTCCAAGAACACGCTG
TATCTGCAAATGAACAGCCTGCGTGCCGAGGACACCGCGGTATATTACTGTGCGAAAAGGCTTACTCTTAGTGCGACTA
AGTTTGACTACTGGGGTCAGGGAACCCTGGTCACCGTCTCGAGC (SEQ ID NO: 737)
BMS3h-203
GAGGTGCAGCTGTTGGAGTCTGGGGGAGGCTTGGTACAGCCTGGGGGGTCCCTGCGTCTCTCCTGTGCAGCCTCCGGAT
TCACCTTTGAGGATTATGTGATGGGTTGGGTCCGCCAGGCTCCAGGGAAGGGTCTAGAGTGGGTCTCAACTATTGCGCA
TCGGGGTGATATTACATACTACGCAGACTCCGTGAAGGGCCGGTTCACCATCTCCCGCGACAATTCCAAGAACACGCTG
TATCTGCAAATGAACAGCCTGCGTGCCGAGGACACCGCGGTATATTACTGTGCGAAACGTAGGCGTCTTAGTGATTATC
GGTTTGACTACTGGGGTCAGGGAACCCTGGTCACCGTCTCGAGC (SEQ ID NO: 738)
BMS3h-204
GAGGTGCAGCTGTTGGAGTCTGGGGGAGGCTTGGTACAGCCTGGGGGGTCCCTGCGTCTCTCCTGTGCAGCCTCCGGAT
TCACCTTTGGGCAGTTTGATATGTATTGGGTCCGCCAGGCTCCAGGGAAGGGTCTAGAGTGGGTCTCAGCGATTAGTCC
GGCTGGTACTGGTACATACTACGCAGACTCCGTGAAGGGCCGGTTCACCATCTCCCGCGACAATTCCAAGAACACGCTG
TATCTGCAAATGAACAGCCTGCGTGCCGAGGACACCGCGGTATATTACTGTGCGAAAGCGGGGGATCGGTCTAGTCTTT
TTGACTACAGGGGTCAGGGAACCCTGGTCACCGTCTCGAGC (SEQ ID NO: 739)
BMS3h-205
GAGGTGCAGCTGTTGGAGTCTGGGGGAGGCTTGGTACAGCCTGGGGGGTCCCTGCGTCTCTCCTGTGCAGCCTCCGGAT
TCACCTTTAAGGATACGGGTATGACGTGGGTCCGCCAGGCTCCAGGGAAGGGTCTAGAGTGGGTCTCAAGTATTTCTAG
TTATGGTCGTGATACATACTACGCAGACTCCGTGAAGGGCCGGTTCACCATCTCCCGCGACAATTCCAAGAACACGCTG
TATCTGCAAATGAACAGCCTGCGTGCCGAGGACGCCGCGGTATATTACTGTGCGAAATTGAATGCGGCGCTGGGTTTTG
ACTACTGGGGTCAGGGAACCCTGGTCACCGTCTCGAGC (SEQ ID NO: 740)
BMS3h-206
GAGGTGCAGCTGTTGGAGTCTGGGGGAGGCTTGGTACAGCCTGGGGGGTCCCTGCGTCTCTCCTGTGCAGCCTCCGGAT
TCACCTTTGGTCCGTATCCGATGAGTTGGGTCCGCCAGGCTCCAGGGAAGGGTCTAGAGTGGGTCTCAGGTATTAATGC
GCCGGGTACGAGGACATACTACGCAGACTCCGTGAAGGGCCGGTTCACCATCTCCCGCGACAATTCCAAGAACACGCTG
TATCTGCAAATGAACAGCCTGCGTGCCGAGGACACCGCGGTATATTACTGTGCGCAACAGATGTCTAGTGGGGTTTTTG
ACTACTGGGGTCAGGGAACCCTGGTCACCGTCTCGAGC (SEQ ID NO: 741)
BMS3h-207
GAGGTGCAGCTGTTGGAGTCTGGGGGAGGCTTGGTACAGCCTGGGGGGTCCCTGCGTCTCTCCTGTGCAGCCTCCGGAT
TCACCTTTTCGAATCAGGATATGACTTGGGTCCGCCAGGCTCCAGGGAAGGGTCTAGAGTGGGTCTCAAGTATTGATAG
TTCTGGTCAGCTTACATACTACGCAGACTCCGTGAAGGGCCGGTTCACCATCTCCCGCGACAATTCCAAGAACACGCTG
TATCTGCAAATGAACAGCCTGCGTGCCGAGGACACCGCGGTATATTACTGTGCGAAAGTTAAGTCTCTTGCGCGGTTTG
ACTACTGGGGTCAGGGAACCCTGGTCACCGTCTCGAGC (SEQ ID NO: 742)
BMS3h-208
GAGGTGCAGCTGTTGGAGTCTGGGGGAGGCTTGGTACAGCCTGGGGGGTCCCTGCGTCTCTCCTGCGCAGCCTCCGGAT
TCACCTTTCCTGAGTCTGATATGAAGTGGGTCCGCCAGGCTCCAGGGAAGGGTCTAGAGTGGGTCTCAAGTATTAGTCC
GAATGGTTGGGATACATACTACGCAGACTCCGTGAAGGGCCGGTTCACCATCTCCCGCGACAATTCCAAGAACACGCTG
TATCTGCAAATGAACAGCCTGCGTGCCGAGGATACCGCGGTATATTACTGTGCGAAACCGGCTCAGGTTCTGTTTGACT
ACTGGGGTCAGGGAACCCTGGTCACCGTCTCGAGC (SEQ ID NO: 743)
BMS3h-209
GAGGTGCAGCTGTTGGAGTCTGGGGGAGGCTTGGTACAGCCTGGGGGGTCCCTGCGTCTCTCCTGTGCAGCCTCCGGAT
TCACCTTTGAGCAGTATGTGATGGGTTGGGTCCGCCAGGCTCCAGGGAAGGGTCTAGAGTGGGTCTCAACGATTGGTAC
GTCGGGTAAGTATACATACTACGCAGACTCCGTGAAGGGCCGGTTCACCATCTCCCGCGACAATTCCAAGAACACGCTG
TATCTGCAAATGAACAGCCTGCGTGCCGAGGACACCGCGGTATATTACTGTGCGCAACGTAGGTCTCTGACTCGGGTTC
ATTTTGACTACTGGGGTCAGGGAACCCTGGTCACCGTCTCGAGC (SEQ ID NO: 744)
BMS3h-210
GAGGTGCAGCTGTTGGAGTCTGGGGGAGGCTTGGTACAGCCTGGGGGGTCCCTGCGTCTCTCCTGTGCAGCCTCCGGAT
TCACCTTTGGTGTGGAGCATATGAGTTGGGTCCGCCAGGCTCCAGGGAAGGGTCTAGAGTGGGTCTCAGCGATTACGGG
TGATGGTGATCGTACATACTACGCAGACTCCGTGAAGGGCCGGTTCACCATCTCCCGCGACAATTCCAAGAACACGCTG
TATCTGCAAATGAACAGCCTGCGTGCCGAGGACACCGCGGTATATTACTGTGCGAAAACGGTTTCGTGGAATGGTCGTT
TTGACTACTGGGGTCAGGGAACCCTGGTCACCGTCTCGAGC (SEQ ID NO: 745)
BMS3h-211
GAGGTGCAGCTGTTGGAGTCTGGGGGAGGCTTGGTACAGCCTGGGGGGTCCCTGCGTCTCTCCTGTGCAGCCTCCGGAT
TCACCTTTGCGTGGTATAATATGGGTTGGGTCCGCCAGGCTCCAGGGAAGGGTCTGGAGTGGGTCTCAAGGATTGCTCC
GTCTGGTATTATTACATACTACGCAGACTCCGTGAAGGGCCGGTTCACCATCTCCCGCGACAATTCCAAGAACACGCTG
TATCTGCAAATGAACAGCCTGCGTGCCGAGGACACCGCGGTATATTACTGTGCGAAAGGGTTGCGTGGTAAGTTTGACT
ACTGGGGTCAGGGAACCCTGGTCACCGTCTCGAGC (SEQ ID NO: 746)
BMS3h-212
GAGGTGCAGCTGTTGGAGTCTGGGGGAGGCTTGGTACAGCCTGGGGGGTCCCTGCGTCTCTCCTGTGCAGCCTCCGGAT
TCACCTTTTCGAATTATGAGATGAGGTGGGTCCGCCAGGCTCCAGGGAAGGGTCTAGAGTGGGTCTCATCTATTTCTTC
GGCTGGTACTGATACATACTACGCAGACTCCGTGAAGGGCCGGTTCACCATCTCCCGCGACAATTCCAAGAACACGCTG
TATCTGCAAATGAACAGCCTGCGTGCCGAGGACACCGCGGTATATTACTGTGCGAAACAGTCGCTTAATTTTGACTACT
GGGGTCAGGGAACCCTGGTCACCGTCTCGAGC (SEQ ID NO: 747)
BMS3h-213
GAGGTGCAGCTGTTGGAGTCTGGGGGAGGCTTGGTACAGCCTGGGGGGTCCCTGCGTCTCTCCTGTGTAGCCTCCGGAT
TCACCTTTGATGAGGAGCCGATGACTTGGGTCCGCCAGGCTCCAGGGAAGGGTCTAGAGTGGGTCTCAATTATTGATCC
GGGTGGTGGGGCGACATACTACGCAGACTCCGTGAAGGGCCGGTTCACCATCTCCCGCGACAATTCCAAGAACACGCTG
TATCTGCAAATGAACAGCCTGCGTGCCGAGGACACCGCGGTATATTACTGTGCGAAATCTAATAGTATGTTTGACTACT
GGGGTCAGGGAACCCTGGTCACCGTCTCGAGC (SEQ ID NO: 748)
BMS3h-214
GAGGTGCAGCTGTTGGAGTCTGGGGGAGGCTTGGTACAGCCTGGGGGGTCCCTGCGTCTCTCCTGTGCAGCCTCCGGAT
TCACCTTTTCTGCGTATCCTATGCATTGGGTCCGCCAGGCTCCAGGGAAGGGTCTAGAGTGGGTCTCATCTATTGCTTC
TTCGGGTATTACGACATACTACGCAGACTCCGTGAAGGGCCGGTTCACCATCTCCCGCGACAATTCCAAGAACACGCTG
TATCTGCAAATGAACAGCCTGCGTGCCGAGGACACCGCGGTATATTACTGTGCGAAATTTACTCGGCTGCATTTTCCTG
CGCAGTTTGACTACTGGGGTCAGGGAACCCTGGTCACCGTCTCGAGC (SEQ ID NO: 749)
BMS3h-215
GAGGTGCAGCTGTTGGAGTCTGGGGGAGGCTTGGTACAGCCTGGGGGGTCCCTGCGTCTCTCCTGTGCAGCCTCCGGAT
TCACCTTTGCTGATTATGCGATGGGTTGGGTCCGCCAGGCTCCAGGGAAGGGTCTAGAGTGGGTCTCAAGGATTTCTCC
TGAGGGTTCTAGGACATACTACGCAGACTCCGTGAAGGGCCGGTTCACCATCTCCCGCGACAATTCCAAGAACACGCTG
TATCTGCAAATGAACAGCCTGCGTGCCGAGGACACCGCGGTATATTACTGTGCGAAATTGCGGCCGTATGCGTCGAAGT
TTGACTACTGGGGTCAGGGAACCCTGGTCACCGTCTCGAGC (SEQ ID NO: 750)
BMS3h-230
GAGGTGCAGCTGTTGGAGTCTGGGGGAGGCTTGGTACAGCCTGGGGGGTCCCTGCGTCTCTCCTGTGCAGCCTCCGGAT
TCACCTTTAGGCCGTATGATATGGGTTGGGTCCGCCAGGCTCCAGGGAAGGGTCTAGAGTGGGTCTCAACGATTTCTCA
TCAGGGTAATCGGACATACTACGCAGACTCCGTGAAGGGCCGGTTCACCATCTCCCGCGACAATTCCAAGAACACGCTG
TATCTGCAAATGAACAGCCTGCGTGCCGAGGACACCGCGGTATATTACTGTGCGAAAGTGTCTCATCATTTTGACTACT
GGGGTCAGGGAACCCTGGTCACCGTCTCGAGC (SEQ ID NO: 751)
BMS3h-231
GAGGTGCAGCTGTTGGAGTCTGGGGGAGGCTTGGTACAGCCTGGGGGGTCCCTGCGTCTCTCCTGTGCAGCCTCCGGAT
TCACCTTTTCTGCGTATAATATGTGGTGGGCCCGCCAGGCTCCAGGGAAGGGTTTAGAGTGGGTCTCATGGATTAATTC
GACTGGTTCTCGTACATACTACGCAGACTCCGTGAAGGGCCGGTTCACCATCTCCCGCGACAATTCCAAGAACACGCTG
TATCTGCAAATGAACAGCCTGCGTGCCGAGGATACCGCGGTATATTACTGTGCGAAAAATTGGCATCGGGGGAGGTTTG
ACTACTGGGGTCAGGGAACCCTGGTCACCGTCTCGAGC (SEQ ID NO: 752)
BMS3h-232
GAGGTGCAGCTGTTGGAGTCTGGGGGAGGCTTGGTACAGCCTGGGGGGTCCCTGCGTCTCTCCTGTGCAGCCTCCGGAT
TCACCTTTGATAGGTATCGGATGGGGTGGGTCCGCCAGGCTCCAGGGAAGGGTCTAGAGTGGGTCTCAACGATTAATCG
GCTGGGTCAGAGTACATACTACGCAGACTCCGTGAAGGGCCGGTTCACCATCTCCCGCGACAATTCCAAGAACACGCTG
TATCTGCAAATGAACAGCCTGCGTGCCGAGGACACCGCGGTATATTACTGTGCGAAAGTGAAGAAGCATAAGTTTGACT
ACTGGGGTCAGGGAACCCTGGTCACCGTCTCGAGC (SEQ ID NO: 753)
BMS3h-233
GAGGTGCAGCTGTTGGAGTCTGGGGGAGGCTTGGTACAGCCTGGGGGGTCCCTGCGTCTCTCCTGTGCAGCCTCCGGAT
TCACCTTTGCGCATTATAATATGCGGTGGGTCCGCCAGGCTCCAGGGAAGGGTCTAGAGTGGGTCTCAACGATTACGAA
GACTGGTTTTCGTACATACTACGCAGACTCCGTGAAGGGCCGGTTCACCATCTCCCGTGACAATTCCAAGAACACGCTG
TATCTGCAAATGAACAGCCTGCGTGCCGAGGACACCGCGGTATATTACTGTGCGAAAGCGGGGCAGTTTGATTTTGACT
ACTGGGGTCAGGGAACCCTGGTCACCGTCTCGAGC (SEQ ID NO: 754)
BMS3h-234
GAGGTGCAGCTGTTGGAGTCTGGGGGAGGCTTAGTACAGCCTGGGGGGTCCCTGCGTCTCTCCTGTGCAGCCTCCGGAT
TCACCTTTTATCCTTATAGTATGCATTGGGTCCGCCAGGCTCCAGGGAAGGGTCTGGAGTGGGTCTCAACTATTGATGG
TAGTGGTATGTTTACATACTACGCAGACTCCGTGAAGGGCCGGTTCACCATCTCCCGCGACAATTCCAAGAACACGCTG
TATCTGCAAATGAACAGCCTGCGTGCCGAGGACACCGCGGTATATTACTGTGCGGAAGATTCTCTGAAGGCTTCTTTTG
ACTACTGGGGTCAGGGAACCCTGGTCACCGTCTCGAGC (SEQ ID NO: 755)
BMS3h-235
GAGGTGCAGCTGTTGGAGTCTGGGGGAGGCTTGGTACAGCCTGGGGGGTCCCTGCGTCTCTCCTGTGCAGCCTCCGGAT
TCACCTTTCCGCTTTATGGGATGTGGTGGGTCCGCCAGGCTCCAGGGAAGGGTCTAGAGTGGGTCTCATATATTGGGCC
TTATGGTCATACTACATACTACGCAGACTCCGTGAAGGGCCGGTTCACCATCTCCCGCGACAATTCCAAGAACACGCTG
TATCTGCAAATGAACAGCCTGCGTGCCGAGGATACCGCGGTATATTACTGTGCGAAAAAGCGGAAGAAGAAGTTTGACT
ACTGGGGTCAGGGAACCCTGGTCACCGTCTCGAGC (SEQ ID NO: 756)
BMS3h-236
GAGGTGCAGCTGTTGGAGTCTGGGGGAGGCTTGGTACAGCCTGGGGGGTCCCTGCGTCTCTCCTGTGCAGCCTCCGGAT
TCACCTTTCCTAGGTATCGGATGAGTTGGGTCCGCCAGGCTCCAGGGAAGGGTCTAGAGTGGGTCTCAAGTATTACTCC
GTATGGTGCTCATACATACTACGCAGACTCCGTGAAGGGCCGGTTCACCATCTCCCGCGACAATTCCAAGAACACGCTG
TATCTGCAAATGAACAGCCTGCGTGCCGAGGACACCGCGGTATATTACTGTGCGAAATATGGTAAGTGGTATTTTGACT
ACTGGGGTCAGGGAACCCTGGTCACCGTCTCGAGC (SEQ ID NO: 757)
BMS3h-237
GAGGTGCAGCTGTTGGAGTCTGGGGGAGGCTTGGTACAGCCTGGGGGGTCCCTGCGTCTCTCCTGTGCAGCCTCCGGAT
TCACCTTTAATGAGTATGCGATGAGGTGGGTCCGCCAGGCTCCAGGGAAGGGTCTAGAGTGGGTCTCAACGATTGATCG
TCTGGGTCTTCATACATACTACGCAGACTCCGTGAAGGGCCGGTTCACCATCTCCCGCGACAATTCCAAGAACACGCTG
TATCTGCAAATGAACAGCCTGCGTGCCGAGGACACCGCGGTATATTACTGTGCGAAAAGTGGGCCTTTTACGTTTGACT
ACTGGGGTCAGGGAACCCTGGTCACCGTCTCGAGC (SEQ ID NO: 758)
BMS3h-238
GAGGTGCAGCTGTTGGAGTCTGGGGGAGGCTTGGTACAGCCTGGGGGGTCCCTGCGTCTCTCCTGTGCAGCCTCCGGAT
TCACCTTTGAGCGGTATAATATGCGTTGGGTCCGCCAGGCTCCAGGGAAGGGTCTAGAGTGGGTCTCAACGATTGATCG
GCTGGGTCTTGCTACATACTACGCAGACTCCGTGAAGGGCCGGTTCACCATCTCCCGCGACAATTCCAAGAACACGCTG
TATCTGCAAATGAACAGCCTGCGTGCCGAGGACACCGCGGTATATTACTGTGCGAAAGCGGGTTCGTGGTCTTTTGACT
ACTGGGGTCAGGGAACCCTGGTCACCGTCTCGAGC (SEQ ID NO: 759)
BMS3h-239
GAGGTGCAGCTGTTGGAGTCTGGGGGAGGCTTGGTACAGCCTGGGGGGTCCCTGCGTCTCTCCTGTGCAGCCTCCGGAT
TCACCTTTGGTATTTATGATATGAAGTGGGTCCGCCAGGCTCCAGGGAAGGGTCTAGAGTGGGTCTCAACGATTTCGTC
GTCGGGTACTCATACATACTACGCAGACTCCGTGAAGGGCCGGTTCACCATCTCCCGCGACAATTCCAAGAACACGCTG
TATCTGCAAATGAACAGCCTGCGTGCCGAGGACACCGCGGTATATTACTGTGCGAAATATCCTCAGCCTTATCCTTTTG
ACTACTGGGGTCAGGGAACCCTGGTCACCGTCTCGAGC (SEQ ID NO: 760)
BMS3h-240
GAGGTGCAGCTATTGGAGTCTGGGGGAGGCTTGGTACAGCCTGGGGGGTCCCTGCGTCTCTCCTGTGCAGCCTCCGGAT
TCACCTTTTGGGTGTATGATATGCGTTGGGTCCGCCAGGCTCCAGGGAAGGGTCTAGAGTGGGTCTCAACGATTTCTGC
GACTGGTGTGCATACATACTACGCAGACTCCGTGAAGGGCCGGTTCACCATCTCCCGCGACAATTCCAAGAACACGCTG
TATCTGCAAATGAACAGCCTGCGTGCCGAGGACACCGCGGTATATTACTGTGCGAAATATCCGCCTGCTGGTCGGTTTG
ACTACTGGGGTCAGGGAACCCTGGTCACCGTCTCGAGC (SEQ ID NO: 761)
BMS3h-241
GAGGTGCAGCTGTTGGAGTCTGGGGGAGGCTTGGTACAGCCTGGGGGGTCCCTGCGTCTCTCCTGTGCAGCCTCCGGAT
TCACCTTTTCGACTTATGATATGATTTGGGTCCGCCAGGCTCCAGGGAAGGGTCTAGAGTGGGTCTCAGCTATTTCTCC
TAATGGTACTGGTACATACTACGCAGACTCCGTGAAGGGCCGGTTCACCATCTCCCGCGACAATTCCAAGAACACGCTG
TATCTGCAAATGAACAGCCTGCGTGCCGAGGACACCGCGGTATATTACTGTGCGAAACCTCCGCAGGTGAATACTGAGT
TTGACTACCGGGGTCAGGGAACCCTGGTCACCGTCTCGAGC (SEQ ID NO: 762)
BMS3h-243
GAGGTGCAGCTGTTGGAGTCTGGGGGAGGCTTGGTACAGCCTGGGGGGTCCCTGCGTCTCTCCTGTGCAGCCTCCGGAT
TCACCTTTGAGAAGGAGGATATGGGGTGGGTCCGCCAGGCTCCAGGGAAGGGTCTAGAGTGGGTCTCACATATTTCGCC
GAATGGTTATGCGACATACTACGCAGACTCCGTGAAGGGCCGGTTCACCATCTCCCGCGACAATTCCAAGAACACGCTG
TATCTGCAAATGAACAGCCTGCGTGCCGAGGACACCGCGGTATATTACTGTGCGAAAAGTTGGTCTAGTTTTGACTACT
GGGGTCAGGGAACCCTGGTCACCGTCTCGAGC (SEQ ID NO: 763)
BMS3h-244
GAGGTGCAGCTGTTGGAGTCTGGGGGAGGCTTGGTACAGCCTGGGGGGTCCCTGCGTCTCTCCTGTGCAGCCTCCGGAT
TCACCTTTAGTGCTACTCCGATGGAGTGGGCCCGCCAGGCTCCAGGGAAGGGTCTAGAGTGGGTCTCAACTATTTCTGA
GAGTGGTTATAGTACATACTACGCAGACTCCGTGAAGGGCCGGTTCACCATCTCCCGCGACAATTCCAAGAACACGCTG
TATCTGCAAATGAACAGCCTGCGTGCCGAGGACACCGCGGTATATTACTGTGCGAAATGGAATTCGACTACTGGTTTTG
ACTACTGGGGTCAGGGAACCCTGGTCACCGTCTCGAGC (SEQ ID NO: 764)
BMS3h-245
GAGGTGCAGCTGTTGGAGTCTGGGGGAGGCTTGGTACAGCCTGGGGGGTCCCTGCGTCTCTCCTGTGCAGCCTCCGGAT
TCACCTTTAATACGGTGGATATGGAGTGGGTCCGCCAGGCTCCAGGGAAGGGTCTAGAGTGGGTCTCAAGTATTAGTCC
GAATGGTTGGGATACATACTACGCAGACTCCGTGAAGGGCCGGTTCACCATCTCCCGCGACAATTCCAAGAACACGCTG
TATCTGCAAATGAACAGCCTGCGTGCCGAGGACACCGCGGTATATTACTGTGCGGAAGCTCCGCATCGGGCGTTTGACT
ACTGGGGTCAGGGAACCCTGGTCACCGTCTCGAGC (SEQ ID NO: 765)
BMS3h-246
GAGGTGCAGCTGTTGGAGTCTGGGGGGGGCTTGGTACAGCCTGGGGGGTCCCTGCGTCTCTCCTGTGCAGCCTCCGGAT
TCACCTTTGAGGATAAGGAGATGAGTTGGGTCCGCCAGGCTCCAGGGAAGGGTCTAGAGTGGGTCTCACGGATTGATGC
TTTGGGTGATTCTACATACTACGCAGACTCCGTGAAGGGCCGGTTCACCATCTCCCGCGACAATTCCAAGAACACGCTG
TATCTGCAAATGAACAGCCTGCGTGCCGAGGACACCGCGGTATATTACTGTGCGGAAGGGATGGTTCCTCGTCTGAAGT
TTGACTACTGGGGTCAGGGAACCCTGGTCACCGTCTCGAGC (SEQ ID NO: 766)
BMS3h-247
GAGGTGCAGCTGTTGGAGTCTGGGGGAGGCTTGGTACAGCCTGGGGGGTCCCTGCGTCTCTCCTGTGCAGCCTCCGGAT
TCACCTTTAGTGATCATTCGATGATGTGGGTCCGCCAGGCTCCAGGGAAGGGTCTAGAGTGGGTCTCAGATATTGAGCC
GCATGGTGTTCATACATACTACGCAGACTCCGTGAAGGGCCGGTTCACCATCTCCCGCGACAATTCCAAGAACACGCTG
TATCTGCAAATGAACAGCCTGCGTGCCGAGGACACCGCGGTATATTACTGTGCGAATCCTACTTTTGACTACTGGGGTC
AGGGAACCCTGGTCACCGTCTCGAGC (SEQ ID NO: 767)
BMS3h-248
GAGGTGCAGCTGTTGGAGTCTGGGGGAGGCTTGGTACAGCCTGGGGGGTCCCTGCGTCTCTCCTGTGCAGCCTCCGGAT
TCACCTTTTCGCCGCATACTATGCATTGGGTCCGCCAGGCTCCAGGGAAGGGTCTAGAGTGGGTCTCAGGTATTGGTCC
GGATGGTACTACTACATACTACGCAGACTCCGTGAAGGGCCGGTTCACCATCTCCCGCGACAATTCCAAGAACACGCTG
TATCTGCAAATGAACAGCCTGCGTGCCGAGGACACCGCGGTATATTACTGTGCGAAACGTTCGTATAGTTGGGATCGTG
GGTGGACGTTTGACTACTGGGGTCAGGGAACCCTGGTCACCGTCTCGAGC (SEQ ID NO: 768)
BMS3h-249
GAGGTGCAGCTGTTGGAGTCTGGGGGAGGCTTGGTACAGCCTGGGGGGTCCCTGCGTCTCTCCTGTGCAGCCTCCGGAT
TCACCTTTTATGCTTCGGATATGAAGTGGGTCCGCCAGGCTCCAGGGAAGGGTCTAGAGTGGGTCTCAAGTATTAGTCC
GAATGGTTGGGATACATACTACGCAGACTCCGTGAAGGGCCGGTTCACCATCTCCCGCGACAATTCCAAGAACACGCTG
TATCTGCAAATGAACAGCCTGCGTGCCGAGGACACCGCGGTATATTACTGTGCGAAAGCTGATTATACTTATCATTCTT
TTGACTACTGGGGTCAGGGGACCCTGGTCACCGTCTCGAGC (SEQ ID NO: 769)
BMS3h-250
GAGGTGCAGCTGTTGGAGTCTGGGGGAGGCTTGGTACAGCCTGGGGGGTCCCTGCGTCTCTCCTGTGCAGCCTCCGGAT
TCACCTTTGCGCATTATAATATGCGGTGGGTCCGCCAGGCTCCAGGGAAGGGTCTAGAGTGGGTCTCAACGATTACGAA
GACTGGTTTTCGTACATACTACGCAGACTCCGTGAAGGGCCGGTTCACCATCTCCCGTGACAATTCCAAGAACACGCTG
TATCTGCAAATGAACAGCCTGCGTGCCGAGGACACCGCGGTATATTACTGTGCGAAAGCGGGGCAGTTTGATTTTGACT
ACTGGGGTCAGGGAACCCTGGTCACCGTCTCGAGC (SEQ ID NO: 770)
BMS3h-251
GAGGTGCAGCTGTTGGAGTCTGGGGGAGGCTTGGTACAGCCTGGGGGGTCCCTGCGTCTCTCCTGTGCAGCCTCCGGAT
TCACCTTTTCGCATTATCATATGGGTTGGGCCCGCCAGGCTCCAGGGAAGGGTCTAGAGTGGGTCTCAGTTATTGGGCC
GAGGGGTATTTCTACATACTACGCAGACTCCGTGAAGGGCCGGTTCACCATCTCCCGCGACAATTCCAAGAACACGCTG
TATCTGCAAATGAACAGCCTGCGTGCCGAGGACACCGCGGTATATTACTGTGCGAAATCGCCTTCGCGTCATAGGTTTG
ACTACTGGGGTCAGGGAACCCTGGTCACCGTCTCGAGC (SEQ ID NO: 771)
BMS3h-252
GAGGTGCAGCTGTTGGAGTCTGGGGGAGGCTTGGTACAGCCTGGGGGGTCCCTGCGTCTCTCCTGTGCAGCCTCCGGAT
TCACCTTTAATGAGTATGCGATGAGGTGGGTCCGCCAGGCTCCAGGGAAGGGTCTAGAGTGGGTCTCAACGATTGATCG
TCTGGGTCTTCATACATACTACGCAGACTCCGTGAAGGGCCGGTTCACCATCTCCCGCGACAATTCCAAGAACACGCTG
TATCTGCAAATGAACAGCCTGCGTGCCGAGGACACCGCGGTATATTACTGTGCGAAAAGTGGGCCTTTTACGTTTGACT
ACTGGGGTCAGGGAACCCTGGTCACCGTCTCGAGC (SEQ ID NO: 772)
BMS3h-253
GAGGTGCAGCTGTTGGAGTCTGGGGGAGGCTTGGTACAGCCTGGGGGGTCCCTGCGTCTCTCCTGTGCAGCCTCCGGAT
TCACCTTTGGTAATTATAGTATGAAGTGGGCCCGCCAGGCTCCAGGGAAGGGTCTAGAGTGGGTCTCAACTATTACTCC
TGATGGTTGGTATACATACTACGCAGACTCCGTGAAGGGCCGGTTCACCATCTCCCGCGACAATTCCAAGAACACGCTG
TATCTGCAAATGAACAGCCTGCGTGCCGAGGACACCGCGGTATATTACTGTGCGAAAGTGGGGGATGCTGTTTGGGGGT
GGATTGGTGGGTTTGACTACTGGGGTCAGGGAACCCTGGTCACCGTCTCGAGC (SEQ ID NO: 773)
BMS3h-254
GAGGTGCAGCTGTTGGAGTCTGGGGGAGGCTTGGTACAGCCTGGGGGGTCCCTGCGTCTCTCCTGTGCAGCCTCCGGAT
TCACCTTTGGGGATTATGGTATGAAGTGGGTCCGCCAGGCTCCAGGGAAGGGTCTAGAGTGGGTCTCAGCTATTACGTC
TAATGGTGATTTTACATACTACGCAGACTCCGTGAAGGGCCGGTTCACCATCTCCCGCGACAATTCCAAGAACACGCTG
TATCTGCAAATGAACAGCCTGCGTGCCGAGGACACCGCGGTATATTACTGTGCGAAATCTTTGTATAAGTTTGACTACT
GGGGTCAGGGAACCCTGGTCACCGTCTCGAGC (SEQ ID NO: 774)
BMS3h-255
GAGGTGCAGCTGTTGGAGTCTGGGGGAGGCTTGGTACAGCCTGGGGGGTCCCTGCGTCTCTCCTGTGCAGGCTCCGGAT
TCACCTTTCCTACTTATAAGATGGGGTGGGTCCGCCAGGCTCCAGGGAAGGGTCTAGAGTGGGTCTCATTTATTGATTA
TTGGGGTTGGCGGACATACTACGCAGACTCCGTGAAGGGCCGGTTCACCATCTCCCGCGACAATTCCAAGAACACGCTG
TATCTGCAAATGAACAGCCTGCGTGCCGAGGACACCGCGGTATATTACTGTGCGAAAAGTCCGTATTCTTGGACTCATG
ATAGTCCTCATTTTGACTACTGGGGTCAGGGAACCCTGGTCACCGTCTCGAGC (SEQ ID NO: 775)
BMS3h-256
GAGGTGCAGCTGTTGGAGTCTGGGGGAGGCTTGGTACAGCCTGGGGGGTCCCTGCGTCTCTCCTGTGCAGCCTCCGGAT
TCACCTTTAGGCCTTATACGATGTGTTGGGCCCGCCAGGCTCCAGGGAAGGGTCTAGAGTGGGTCTCATGTATTAGTGA
TGCTGGTTCTTTTACATACTACGCAGACTCCGTGAAGGGCCGGTTCACCATCTCCCGCGACAATTCCAAGAACACGCTG
TATCTGCAAATGAACAGCCTGCGTGCCGAGGATACCGCGGTATATTACTGTGCGAAAAGGATGTCTTCTTTTGACTACT
GGGGTCAGGGAACCCTGGTCACCGTCTCGAGC (SEQ ID NO: 776)
BMS3h-257
GAGGTGCAGCTGTTGGAGTCTGGGGGAGGCTTGGTACAGCCTGGGGGGTCCCTGCGTCTCTCCTGTGCAGCCTCCGGAT
TCACCTTTCAGAATTATCAGATGGCTTGGGTCCGCCAGGCTCCAGGGAAGGGTCTAGAGTGGGTCTCAACTATTAGTGG
GACTGGTAAGAATACATACTACGCAGACTCCGTGAAGGGCCGGTTCACCATCTCCCGCGACAATTCCAAGAACACGCTG
TATCTGCAAATGAACAGCCTGCGTGCCGAGGACACCGCGGTATATTACTGTGCGAAAACTCCTCAGAATTATTTTAGTG
TGCGTCGGTTTGACTACTGGGGTCAGGGAACCCTGGTCACCGTCTCGAGC (SEQ ID NO: 777)
BMS3h-258
GAGGTGCAGCTGTTGGAGTCTGGGGGAGGCTTGGTACAGCCTGGGGGGTCCCTGCGTCTCTCCTGTGCAGCCTCCGGAT
TCACCTTTGGGGCGTATACTATGGGGTGGGTCCGCCAGGCTCCAGGGAAGGGTCTAGAGTGGGTCTCAAAGATTTCGAC
GTCTGGTGGGCAGACATACTACGCAGACTCCGTGAAGGGCCGGTTCACCATCTCCCGCGACAATTCCAAGAACACGCTG
TATCTGCAAATGAACAGCCTGCGTGCCGAGGACACCGCGGTATATTACTGTGCGAAACCTTTGAATTGGTGGGCGTTTG
ACTACTGGGGTCAGGGAACCCTGGTCACCGTCTCGAGC (SEQ ID NO: 778)
BMS3h-272
GAGGTGCAGCTGTTGGAGTCTGGGGGAGGCTTGGTACAGCCTGGGGGGTCCCTGCGTCTCTCCTGTGCAGCCTCCGGAT
TCACCTTTAATGCGTATCCTATGACTTGGGTCCGCCAGGCTCCAGGGAAGGGTCTAGAGTGGGTCTCACGGATTGATGG
TTATGGTCGGCATACATACTACGCAGACTCCGTGAAGGGCCGGTTCACCATCTCCCGCGACAATTCCAAGAACACGCTG
TATCTGCAAATGAACAGCCTGCGTGCCGAGGACACCGCGGTATATTACTGTGCGAAAGGGATTATTCCTAATTTTGACT
ACTGGGGTCAGGGAACCCTGGTCACCGTCTCGAGC (SEQ ID NO: 779)
BMS3h-273
GAGGTGCAGCTGTTGGAGTCTGGGGGAGGCTTGGTACAGCCTGGGGGGTCCCTGCGTCTCTCCTGTGCAGCCTCCGGAT
TCACCTTTGGGGCGGTTGATATGACGTGGGTCCGCCAGGCTCCAGGGAAGGGTCTAGAGTGGGTCTCAGCGATTTCGCC
TAGTGGTTCTGCTACATACTACGCAGACTCCGTGAAGGGCCGGTTCACCATCTCCCGCGACAATTCCAAGAACACGCTG
TATCTGCAAATGAACAGCCTGCGTGCCGAGGACACCGCGGTATATTACTGTGCGAAAGGGCGTGTGCCGGATCTTGGTT
TTGACTACTGGGGTCAGGGAACCCTGGTCACCGTCTCGAGC (SEQ ID NO: 780)
BMS3h-274
GAGGTGCAGCTGTTGGAGTCTGGGGGAGGCTTGGTACAGCCTGGGGGGTCCCTGCGTCTCTCCTGTGCAGCCTCCGGAT
TCACCTTTGATAGTTATGCGATGGGGTGGGCCCGCCAGGCTCCAGGGAAGGGTCTAGAGTGGGTCTCAGCTATTGGGGC
TAAGGGTTTGTCTACATACTACGCAGACTCCGTGAAGGGCCGGTTCACCATCTCCCGCGACAATTCCAAGAACACGCTG
TATCTGCAAATGAACAGCCTGCGTGCCGAGGACACCGCGGTATATTACTGTGCGAAAGCGGCTAGGGGTAAGTTTGACT
ACTGGGGTCAGGGAACCCTGGTCACCGTCTCGAGC (SEQ ID NO: 781)
BMS3h-275
GAGGTGCAGCTGTTGGAGTCTGGGGGAGGCTTGGTACAGCCTGGGGGGTCCCTGCGTCTCTCCTGTGCAGCCTCCGGAT
TCACCTTTACTCGGTATCAGATGGGTTGGGTCCGCCAGGCTCCAGGGAAGGGTCTAGAGTGGGTCTCAGTTATTAATGT
TTGGGGTTCGAGTACATACTACGCAGACTCCGTGAAGGGCCGGTTCACCATCTCCCGCGACAATTCCAAGAACACGCTG
TATCTGCAAATGAACAGCCTGCGTGCCGAGGACACCGCGGTATATTACTGTGCGAAAATGTCTGGGAAGTTTGCCTACT
GGGGTCAGGGAACCCTGGTCACCGTCTCGAGC (SEQ ID NO: 782)
BMS3h-276
GAGGTGCAGCTGTTGGAGTCTGGGGGAGGCTTGGTACAGCCTGGGGGGTCCCTGCGTCTTTCCTGTGCAGCCTCCGGAT
TCACCTTTGGGAATTATAGTATGATGTGGGTCCGCCAGGCTCCAGGGAAGGGTCTAGAGTGGGTCTCAACGATTATTCC
TGCTGGTACGTCTACATACTACGCAGACTCCGTGAAGGGCCGGTTCACCATCTCCCGCGACAATTCCAAGAACACGCTG
TATCTGCAAATGAACAGCCTGCGTGCCGAGGACACCGCGGTATATTACTGTGCGAAACCGTCGATTAGGTTGTTTGACT
ACTGGGGTCAGGGAACCCTGGTCACCGTCTCGAGC (SEQ ID NO: 783)
BMS3h-279
GAGGTGCAGCTGTTGGAGTCTGGGGGAGGCTTGGTACAGCCTGGGGGGTCCCTGCGTCTCTCCTGTGCAGCCTCCGGAT
TCACCTTTGGTGCGTATGATATGGGGTGGGTCCGCCAGGCTCCAGGGAAGGGTCTAGAGTGGGTCTCATGGATTTCTCC
GAATGGTTATGATACATACTACGCAGACTCCGTGAAGGGCCGGTTCACCATCTCCCGCGACAATTCCAAGAACACGCTG
TATCTGCAAATGAACAGCCTGCGTGCCGAGGACACCGCGGTATATTACTGTGCGAAAGGGGGTGTGAAGTTTGACTACT
GGGGTCAGGGAACCCTGGTCACCGTCTCGAGC (SEQ ID NO: 784)
BMS3h-282
GAGGTGCAGCTGTTGGAGTCTGGGGGAGGCTTGGTACAGCCTGGGGGGTCCCTGCGTCTCTCCTGTGCAGCCTCCGGAT
TCACCTTTGTTTGGTATGAGATGGCTTGGGTCCGCCAGGCTCCAGGGAAGGGTCTAGAGTGGGTCTCAACGATTCAGGC
TGATGGTGAGCAGACATACTACGCAGACTCCGTGAAGGGCCGGTTCACCATCTCCCGCGACAATTCCAAGAACACGCTG
TATCTGCAAATGAACAGCCTGCGTGCCGAGGATACCGCGGTATATTACTGTGCGAAAGCTTCGTATGCTCTTGTGTATC
CTCCTGAGGAGTTTGACTACTGGGGTCAGGGAACCCTGGTCACCGTCTCGAGC (SEQ ID NO: 785)
BMS3h-287
GAGGTGCAGCTGTTGGAGTCTGGGGGAGGCTTGGTACAGCCTGGGGGGTCCCTGCGTCTCTCCTGTGCAGCCTCCGGAT
TCACCTTTACGAATTATAGGATGTCTTGGGTCCGCCAGGCTCCAGGGAAGGGTCTAGAGTGGGTCTCAGCTATTGATGA
TCTGGGTGTGTCGACATACTACGCAGACTCCGTGAAGGGCCGGTTCACCATCTCCCGCGACAATTCCAAGAACACGCTG
TATCTGCAAATGAACAGCCTGCGTGCCGAGGACACCGCGGTATATTACTGTGCGAAATGGAGGCTTAAGAATAGTCAGC
CGACGGATTTTGACTACTGGGGTCAGGGAACCCTGGTCACCGTCTCGAGC (SEQ ID NO: 786)
BMS3h-292
GAGGTGCAGCTGTTGGAGTCTGGGGGAGGCTTGGTACAGCCTGGGGGGTCCCTGCGTCTCTCCTGTGCAGCCTCCGGAT
TCACCTTTGATCAGGCTCATATGTGGTGGGTCCGCCAGGCTCCAGGGAAGGGTCTAGAGTGGGTCTCATTTATTAATCC
TTCGGGTTATTATACATACTACGCAGACTCCGTGAAGGGCCGGTTCACCATCTCCCGCGACAATTCCAAGAACACGCTG
TATCTGCAAATGAACAGCCTGCGTGCCGAGGACACCGCGGTATATTACTGTGCGAAACCTTCGCTTAGTCCGTCTTCTT
TTGACTACTGGGGTCAGGGAACCCTGGTCACCGTCTCGAGC (SEQ ID NO: 787)
BMS3h-293
GAGGTGCAGCTGTTGGAGTCTGGGGGAGGCTTGGTACAGCCTGGGGGGTCCCTGCGTCTCTCCTGTGCAGCCTCCGGAT
TCACCTTTGAGACTGGTCAGATGGGTTGGGCCCGCCAGGCTCCAGGGAAGGGTCTAGAGTGGGTCTCAAATATTGATGG
GTCTGGTACGTATACATACTACGCAGACTCCGTGAAGGGCCGGTTCACCATCTCCCGCGACAATTCCAAGAACACGCTG
TATCTGCAAATGAACAGCCTGCGTGCCGAGGACACCGCGGTATATTACTGTGCGAAAAGTACGCAGAATTATCGGTTTG
ACTACTGGGGTCAGGGAACCCTGGTCACCGTCTCGAGC (SEQ ID NO: 788)
BMS3h-296
GAGGTGCAGCTGTTGGAGTCTGGGGGAGGCTTGGTACAGCCTGGGGGGTCCCTGCGTCTCTCCTGTGCAGCCTCCGGAT
TCACCTTTGGTGCTTATCCGATGTATTGGGTCCGCCAGGCTCCAGGGAAGGGTCTAGAGTGGGTCTCATCTATTCATAA
GGATGGTAGGATTACATACTACGCAGACTCCGTGAAGGGCCGGTTCACCATCTCCCGCGACAATTCCAAGAACACGCTG
TATCTGCAAATGAACAGCCTGCGTGCCGAGGACACCGCGGTATATTACTGTGCGAAACAGGGTACGCCGGTTGATGGGT
TTGACTACTGGGGTCAGGGAACCCTGGTCACCGTCTCGAGC (SEQ ID NO: 789)
BMS3h-297
GAGGTGCAGCTGTTGGAGTCTGGGGGAGGCTTGGTACAGCCTGGGGGGTCCCTGCGTCTCTCCTGTGCAGCCTCCGGAT
TCACCTTTCCTGATGAGGGTATGACGTGGGTCCGCCAGGCTCCAGGGAAGGGTCTAGAGTGGGTCTCAACGATTGAGAC
TGGTGGTACGGTGACATACTACGCAGACTCCGTGAAGGGCCGGTTCACCATCTCCCGCGACAATTCCAAGAACACGCTG
TATCTGCAAATGAACAGCCTGCGTGCCGAGGACACCGCGGTATATTACTGTGCGAAAATGGATGGGTCTGGTACATGGC
AGACGTTTGACTACTGGGGTCAGGGAACCCTGGTCACCGTCTCGAGC (SEQ ID NO: 790)
BMS3h-298
GAGGTGCAGCTGTTGGAGTCTGGGGGAGGCTTGGTACAGCCTGGGGGGTCCCTGCGTCTCTCCTGTGCAGCCTCCGGAT
TCACCTTTGATAGTCTGGGTATGGGTTGGGCCCGCCAGGCTCCAGGGAAGGGTCTAGAGTGGGTCTCATATATTCGGGC
TGAGGGTGCTTATACATACTACGCAGACTCCGTGAAGGGCCGGTTCACCATCTCCCGCGACAATTCCAAGAACACGCTG
TATCTGCAAATGAACAGCCTGCGTGCCGAGGATACCGCGGTATATTACTGTGCGAAATATCTTGCGGATTCTGACTACT
GGGGTCAGGGAACCCTGGTCACCGTCTCGAGC (SEQ ID NO: 791)
BMS3h-299
GAGGTGCAGCTGTTGGAATCTGGGGGAGGCTTGGTACAGCCTGGGGGGTCCCTGCGTCTCTCCTGTGCAGCCTCCGGAT
TCACCTTTAGTGAGTCGTATATGGAGTGGGTCCGCCAGGCTCCAGGGAAGGGTCTAGAGTGGGTCTCAGGTATTGATCA
TATTGGTGGTGGGACATACTACGCAGACTCCGTGAAGGGCCGGTTCACCATCTCCCGCGACAATTCCAAGAACACGCTG
TATCTGCAAATGAACAGCCTGCGTGCCGAGGACACCGCGGTATATTACTGTGCGAAAGATGATGGTCGTGGTGGGTCTA
TGTTTGACTACTGGGGTCAGGGAACCCTGGTCACCGTCTCGAGC (SEQ ID NO: 792)
BMS3h-300
GAGGTGCAGCTGTTGGAGTCTGGGGGAGGCTTGGTACAGCCTGGGGGGTCCCTGCGTCTCTCCTGTGCAGCCTCCGGAT
TCACCTTTTCTGGTGGGTATATGTGGTGGGTCCGCCAGGCTCCAGGGAAGGGTCTAGAGTGGGTCTCAAGTATTGGGGC
TAGTGGTGCGTATACATACTACGCAGACTCCGTGAAGGGCCGGTTCACCATCTCCCGCGACAATTCCAAGAACACGCTG
TATCTGCAAATGAACAGCCTGCGTGCCGAGGACACCGCGGTATATTACTGTGCGAAAACGGGGGGTAGGTTAGACTACT
GGGGTCAGGGAACCCTGGTCACCGTCTCGAGC (SEQ ID NO: 793)
BMS3h-301
GAGGTGCAGCTGTTGGAGTCTGGGGGAGGCTTGGTACAGCCTGGGGGGTCCCTGCGTCTCTCCTGTGCAGCCTCCGGAT
TCACCTTTGATGAGGGGCATATGGGGTGGGTCCGCCAGGCTCCAGGGAAGGATCTAGAGTGGGTCTCATATATTGGGAG
TCTGGGTTTGCATACATACTACGCAGACTCCGTGAAGGGCCGGTTCACCATCTCCCGCGACAATTCCAAGAACACGCTG
TATCTGCAAATGAACAGCCTGCGTGCCGAGGACACCGCGGTATATTACTGTGCGAAACGGGAGTTTAGTAATGGGGGGT
TTGACTACTGGGGTCAGGGAACCCTGGTCACCGTCTCGAGC (SEQ ID NO: 794)
BMS3h-302
GAGGTGCAGCTGTTGGAGTCTGGGGGAGGCTTGGTACAGCCTGGGGGGTCCCTGCGTCTCTCCTGTGCAGCCTCCGGAT
TCACCTTTAAGACTAGTCCTATGTATTGGGTCCGCCAGGCTCCAGGGAAGGGTCTAGAGTGGGTCTCATCGATTGATCG
GACTGGTGGGCATACATACTACGCAGACTCCGTGAAGGGCCGGTTCACCATCTCCCGCGACAATTCCAAGAACACGCTG
TATCTGCAAATGAACAGCCTGCGTGCCGAGGACACCGCGGTATATTACTGTGCGAAACAGGCTCTGCTTACTGATGCGA
AGCGTTTTGACTACTGGGGTCAGGGAACCCTGGTCACCGTCTCGAGC (SEQ ID NO: 795)
BMS3h-303
GAGGTGCAGCTGTTGGAGTCTGGGGGAGGCTTGGTACAGCCTGGGGGGTCCCTGCGTCTCTCCTGTGCAGCCTCCGGAT
TCACCTTTGATGGTCGGGATATGGTTTGGGTCCGCCAGGCTCCAGGGAAGGGTCTAGAGTGGGTCTCAGCTATTAGTCC
GAGTGGTCTGGATACATACTACGCAGACTCCGTGAAGGGCCGGTTCACCATCTCCCGCGACAATTCCAAGAACACGCTG
TATCTGCAAATGAACAGCCTGCGTGCCGAGGACACCGCGGTATATTACTGTGCGGAACGTCCTCAGATGCTGGTTACTA
ATTTTGACTACTGGGGTCAGGGAACCCTGGTCACCGTCTCGAGC (SEQ ID NO: 796)
BMS3h-304
GAGGTGCAGCTGTTGGAGTCTGGGGGAGGCTTGGTACAGCCTGGGGGGTCCCTGCGTCTCTCCTGTGCAGCCTCCGGAT
TCACCTTTGGTAATGATCCGATGAGTTGGGTCCGCCAGGCTCCAGGGAAGGGTCTAGAGTGGGTCTCAGGGATTGGTCG
GGAGGGTGATTCTACATACTACGCAGACTCCGTGAAGGGCCGGTTCACCATCTCCCGCGACAATTCCAAGAACACGCTG
TATCTGCAAATGAACAGCCTGCGTGCCGAGGACACCGCGGTATATTACTGTGCGAAAGATTCTATGCGGCATCAGCCGT
TTGACTACTGGGGTCAGGGAACCCTGGTCACCGTCTCGAGC (SEQ ID NO: 797)
BMS3h-305
GAGGTGCAGCTGTTGGAGTCTGGGGGAGGCTTGGTACAGCCTGGGGGGTCCCTGCGTCTCTCCTGTGCAGCCTCCGGAT
TCACCTTTGATGAGACTTATATGAAGTGGGTCCGCCAGGCTCCAGGGAAGGGTCTAGAGTGGGTCTCAGCGATTGGGGC
GTCGGGTGCTGATACATACTACGCAGACTCCGTGAAGGGCCGGTTCACCATCTCCCGCGACAATTCCAAGAACACGCTG
TATCTGCAAATGAACAGCCTGCGTGCCGAGGACACCGCGGTATATTACTGTGCGAAATTTACGCATCTGAATGGTCGGT
TTGACTACTGGGGTCAGGGAACCCTGGTCACCGTCTCGAGC (SEQ ID NO: 798)
BMS3h-306
GAGGTGCAGCTGTTGGAGTCTGGGGGAGGCTTGGTACAGCCTGGGGGGTCCCTGCGTCTCTCCTGTGCAGCCTCCGGAT
TCACCTTTGGGGGGTGGCCTATGGGGTGGGTCCGCCAGGCTCCAGGGAAGGGTCTAGAGTGGGTCTCAGGTATTGATAT
TGATGGTGCTCCGACATACTACGCAGACTCCGTGAAGGGCCGGTTCACCATCTCCCGCGACAATTCCAAGAACACGCTG
TATCTGCAAATGAACAGCCTGCGTGCCGAGGACACCGCGGTATATTACTGTGCGAAAGAGGAGGCGGGTTCTTGGTCTT
TTGACTACTGGGGTCAGGGAACCCTGGTCACCGTCTCGAGC (SEQ ID NO: 799)
BMS3h-307
GAGGTGCAGCTGTTGGAGTCTGGGGGAGGCTTGGTACAGCCTGGGGGGTCCCTGCGTCTCTCCTGTGCAGCCTCCGGAT
TCACCTTTAGTGATCAGGCGATGTGGTGGGCCCGCCAGGCTCCAGGGAAGGGTCTAGAGTGGGTCTCATTTATTCAGGG
TGATGGTGGTTTTACATACTACGCAGACTCCGTGAAGGGCCGGTTCACCATCTCCCGCGACAATTCCAAGAACACGCTG
TATCTGCAAATGAACAGCCTGCGTGCCGAGGACACCGCGGTATATTACTGTGCGAAACCTAGTAAGCCGTTTGACTACT
GGGGTCAGGGAACCCTGGTCACCGTCTCGAGC (SEQ ID NO: 800)
BMS3h-308
GAGGTGCAGCTGTTGGAGTCTGGGGGAGGCTTGGTACAGCCTGGGGGGTCCCTGCGTCTCTCCTGTGCAGCCTCCGGAT
TCACCTTTGAGACTGGTCAGATGGGTTGGGCCCGCCAGGCTCCAGGGAAGGGTCTAGAGTGGGTCTCAAATATTGATGG
GTCTGGTACGTATACATACTACGCAGACTCCGTGAAGGGCCGGTTCACCATCTCCCGCGACAATTCCAAGAACACGCTG
TATCTGCAAATGAACAGCCTGCGTGCCGAGGACACCGCGGTATATTACTGTGCGAAAGCGGTGCGGAATTTTGCTTTTG
ACTACTGGGGTCAGGGAACCCTGGTCACCGTCTCGAGC (SEQ ID NO: 801)
BMS3h-309
GAGGTGCAGCTGTTGGAGTCTGGGGGAGGCTTGGTACAGCCTGGGGGGTCCCTGCGTCTCTCCTGTGCAGCCTCCGGAT
TCACCTTTAGTGGGCATGATATGTCTTGGGTCCGCCAGGCTCCAGGGAAGGGTCTAGAGTGGGTCTCAGCTATTAGTCC
TCATGGTACGCATACATACTACGCAGACTCCGTGAAGGGCCGGTTCACCATCTCCCGCGACAATTCCAAGAACACGCTG
TATCTGCAAATGAACAGCCTGCGTGCCGAGGACACCGCGGTATATTACTGTGCGAAAGGGATTAGGGGTTGGATTGGTC
ATGATACGCAGCCTTTTGACTACTGGGGTCAGGGAACCCTGGTCACCGTCTCGAGC (SEQ ID NO: 802)
BMS3h-310
GAGGTGCAGCTGTTGGAGTCTGGGGGAGGCTTGGTACAGCCTGGGGGGTCCCTGCGTCTCTCCTGTGCAGCCTCCGGAT
TCACCTTTGAGAGTAAGGATATGCTTTGGGTCCGCCAGGCTCCAGGGAAGGGTCTAGAGTGGGTCTCATCTATTTCGTC
GGATGGTACTCATACATACTACGCAGACTCCGTGAAGGGCCGGTTCACCATCTCCCGCGACAATTCCAAGAACACGCTG
TATCTGCAAATGAACAGCCTGCGTGCCGAGGACACCGCGGTATATTACTGTGCGCAAGAGCTGGGTGGGTCTTGGCAGT
TTGACTACTGGGGTCAGGGAACCCTGGTCACCGTCTCGAGC (SEQ ID NO: 803)
BMS3h-311
GAGGTGCAGCTGTTGGAGTCTGGGGGAGGCTTGGTACAGCCTGGGGGGTCCCTGCGTCTCTCCTGTGCAGCCTCCGGAT
TCACCTTTGCGGATCGTGATATGGTTTGGGTCCGCCAGGCTCCAGGGAAGGGTCTAGAGTGGGTCTCAGGTATTGGGGC
GTCGGGTACGTCTACATACTACGCAGACTCCGTGAAGGGCCGGTTCACCATCTCCCGCGACAATTCCAAGAACACGCTG
TATCTGCAAATGAACAGCCTGCGTGCCGAGGACGCCGCGGTATATTACTGTGCGAAAGGTGGGACGGGTCCTACTGATT
TGTGGGATTTTGACTACTGGGGTCAGGGAACCCTGGTCACCGTCTCGAGC (SEQ ID NO: 804)
BMS3h-312
GAGGTGCAGCTGTTGGAGTCTGGGGGAGGCTTGGTACAGCCTGGGGGGTCCCTGCGTCTCTCCTGTGCAGCCTCCGGAT
TCACCTTTGATGATGAGAAGATGCTTTGGGTCCGCCAGGCTCCAGGGAAGGGTCTAGAGTGGGTCTCAAGTATTAGTGT
GAGTGGTCTGCATACATACTACGCAGACTCCGTGAAGGGCCGGTTCACCATCTCCCGCGACAATTCCAAGAACACGCTG
TATCTGCAAATGAACAGCCTGCGTGCCGAGGACACCGCGGTATATTACTGTGCGAAAGAGGAGGCGGGTTCTTGGTCTT
TTGACTACTGGGGTCAGGGAACCCTGGTCACCGTCTCGAGC (SEQ ID NO: 805)
BMS3h-313
GAGGTGCAGCTGTTGGAGTCCGGGGGAGGCTTGGTACAGCCTGGGGGGTCCCTGCGTCTCTCCTGTGCAGCCTCCGGAT
TCACCTTTGGGCAGGAGAGGATGATTTGGGTCCGCCAGGCTCCTGGGAAGGGTCTAGAGTGGGTCTCAGATATTTCGGC
TTCGGGTGGGACTACATACTACGCAGACTCCGTGAAGGGCCGGTTCACCATCTCCCGCGACAATTCCAAGAACACGCTG
TATCTGCAAATGAACAGCCTGCGTGCCGAGGACACCGCGGTATATTACTGTGCGAAAGAGGAGGCGGGTTCTTGGTCTT
TTGACTACTGGGGTCAGGGAACCCTGGTCACCGTCTCGAGC (SEQ ID NO: 806)
BMS3h-37-1
GAGGTGCAGCTGTTGGAGTCTGGGGGAGGCTTGGTACAGCCTGGGGGGTCTCTGCGTCTCTCCTGTGCAGCCTCCGGAT
TCACCTTTGAGTGGTATGAGATGCAGTGGGTCCGCCAGGCTCCAGGGAAGGGTCTAGAGTGGGTCTCAGCGATTTCTGG
TGATGGTTATCGTACATACTACGCAGACTCCGTGAAAGGCCGGTTCACCATCTCCCGCGACAATTCCATGAACACGCTG
TATCTGCAAATGAACAGCCTGCGTGCCGAGGACACCGCGGTATATTACTGTGCGAAAGAGCTTGGGTATTTTGACTACA
GGGGTCGGGGAACCCTGGTCACCGTCTCGAGC (SEQ ID NO: 807)
BMS3h-37-2
GAGGTGCAGCTGTTGGAGTCTGGGGGAGGCTTGGTACAGCCTGGGGGGTCCCTGCGTCTCTCCTGTGCAGCCTCCGGAT
TCACCTTTGAGTGGTATGAGATGCAGTGGGTCCGCCGGGCTCCAGGGAAGGGACTAGAGTGGGTCTCAGCGATTTCTGG
TGATGGTTATCGTACATACTACGCAGACTCCGTGAAAGGCCGGTTCACCATCTCCCGCGACAATTCCAAGAACACGCTG
TATCTGCAAATGAACAGCCTGCGTGCCGAGGACACCGCGGTATATTACTGTGCGAAAGAGCTTGGGTATTTTGACTACT
GGGGTCGGGGAACCCTGGTCACCGTCTCGAGC (SEQ ID NO: 808)
BMS3h-37-3
GAGGTGCAGCTGTTGGAGTCTGGGGGAGGCTTGGTACAGCCTGGGGGGTCCCTGCGTCTCTCCTGTGCAGCCTCCGGAT
TCACCTTTGAGTGGTATGAGATGCAGTGGGTCCGCCGGGCTCCAGGGAAGGGTCTAGAGTGGGTCTCAGCGATTTCTGG
TGATGGTTATCGTACATACTACGCAGACTCCGTGAAAGGCCGGTTCACCATCTCCCGCGACAATTCCAAGAACACGCTG
TATCTGCAAATGAACAGCCTGCGTGCCGAGGACACCGCGGTATATTACTGTGCGAAAGAGCTTGGGTATTTTGACTACC
GGGTTCAGGGAACCCTGGTCACCGTCTCGAGC (SEQ ID NO: 809)
BMS3h-37-4
GAGGTGCAGCTGTTGGAGTCTGGGGGAGGCTTGGTACAGCCTGGGGGGTCCCTGCGTCTCTCCTGTGCAGCCTCCGGAT
TCACCTTTGAGTGGTATGAGATGCAGTGGGTCCGCAAGGCTCCAGGGAAGGGTCTAGAGTGGGTCTCAGCGATTTCTGG
TGATGGTTATCGTACATACTACGCAGACTCCGTGAAAGGCCGGTTCACCATCTCCCGCGACAATTCCAAGAACACGCTG
TATCTGCAAATGAACAGCCTGCGTGCCGAGGACACCGCGGTATATTACTGTGCGAAAGAGCTTGGGTATTTTGACTACT
GGGGTCGGGGAACCCTGGTCACCGTCTCGAGC (SEQ ID NO: 810)
BMS3h-37-5
GAGGTGCAGCTGTTGGAGTCTGGGGGAGGCTTGGTACAGCCTGGGGGGTCCCTGCGTCTCTCCTGTGCAGCCTCCGGAT
TCACCTTTGAGTGGTATGAGATGCAGTGGGTCCGCCAGGCTCCAGGGAAGGGTCTAGAGTGGATCTCAGCGATTTCTGG
TGATGGTTATCGTACATACTACGCAGACTCCGTGAAAGGCCGGTTCACCATCTCCCGCGACAATTCCAAGAACACGCTG
TATCTGCAAATGAACAGCCTGCGTGCCGAGGACACCGCGGTATATTACTGTGCGAAAGAGCTTGGGTATTTTGACTACA
GGGTTCAGGGAACCCTGGTCACCGTCTCGAGC (SEQ ID NO: 811)
BMS3h-37-6
GAGGTGCAGCTGTTGGAGTCTGGGGGAGGCTTGGTACAGCCTGGGGGGTCCCTGCGTCTCTCCTGTGCAGCCTCCGGAT
TCACCTTTGAGTGGTATGAGATGCAGTGGGTCCGCCGGGCTCCAGGGAAGGGTCTAGAGTGGGTCTCAGCGATTTCTGG
TGATGGTTATCGTACATACTACGCAGACTCCGTGAAAGGCCGGTTCACCATCTCCCGCGACAATTCCGAGAACACGCTG
TATCTGCAAATGAACAGCCTGCGTGCCGAGGACACCGCGGTATATTACTGTGCGAAAGAGCTTGGGTATTTTGACTACT
GGGGTCGGGGAACCCTGGTCACCGTCTCGAGC (SEQ ID NO: 812)
BMS3h-37-7
GAGGTGCAGCTGTTGGAGACTGGGGGAGGCTTGGTACAGCCTGGGGGGTCCCTGCGTCTCTCCTGTGCAGCCTCCGGAT
TCACCTTTGAGTGGTATGAGATGCAGTGGGTCCGCCGGGCTCCAGGGAAGGGTCTAGAGTGGGTCTCAGCGATTTCTGG
TGATGGTTATCGTACATACTACGCAGACTCCGTGAAAGGCCGGTTCACCATCTCCCGCGACAATTCCAAGAACACGCTG
TATCTGCAAATGGACAGCCTGCGTGCCGAGGACACCGCGGTATATTACTGTGCGAAAGAGCTTGGGTATTTTGACTACT
GGGGTCGGGGAACCCTGGTCACCGTCACGAGC (SEQ ID NO: 813)
BMS3h-37-8
GAGGTGCAGCTGTTGGAGTCTGGGGGAGGCTTGGTACAGCCTGGGGGGTCCCTGCGTCTCTCCTGTGCAGCCTCCGGAT
TCACCTTTGAGTGGTATGAGATGCAGTGGGTCCGCCAGGCTCCAGGGAAGGGTCTAGAGTGGGTCTCAGCGATTTCTGG
TGATGGTTATCGTACATACTACGCAGACTCCGTGAAAGGCCGGTTCACCATCTCACGCGACAATTCCAAGAACACGCTG
TATCTGCAAATGAACAGCCTGCGTGCCGAGGACACCGCGGTATATTACTGTGCGAAAGAGCTTGGGTATTTTCACTACT
GGGGTCGGGGAACCCTGGTCACCGTCTCGAGC (SEQ ID NO: 814)
BMS3h-37-9
GAGGTGCAGCTGTTGGAGTCTGGGGGAGGCTTGGTACAGCCTGGGGGGTCCCTGCGTCTCTCCTGTGTAGCCTCCGGAT
TCACCTTTGAGTGGTATGAGATGCAGTGGGTCCGCCAGGCTCCAGGGAATGGTCTAGAGTGGATCTCAGCGATTTCTGG
TGATGGTTATCGTACATACTACGCAGACTCCGTGAAAGGCCGGTTCACCATCTCCCGCGACAATTCCAAGAACACGCTG
TATCTGCAAATGAACAGCCTGCGTGCCGAGGACACCGCGGTATATTACTGTGCGAAAGAGCTTGGGTATTTTGACTACT
GGGGTCGGGGAACCCTGGTCACCGTCTCGAGC (SEQ ID NO: 815)
BMS3h-37-10
GAGGTGCAGCTGTTGGAGTCTGGGGGAGGCTTGGTACAGCCTGGGGGGTCCCTGCGTCTCTCCTGTGCAGCCTCTGGAT
TCACCTTTGAGTGGTATGAGATGCAGTGGGTCCGCCGGGCTCCAGGGAAGGGTCTAGAGTGGGTCTCAGCGATATCTGG
TGATGGTTATCGTACATACTACGCAGACTCCGTGAAAGGCCGGTTCACCATCTCCCGCGACAATTCCAAGAACACGCTG
TATCTGCTAATGAACAGCCTGCGTGCCGAGGACACCGCGGTATATTACTGTGCGAAAGAGCTTGGGTATTTCGACTACT
GGGGTCGGGGAACCCTCGTCACCGTCTCGAGC (SEQ ID NO: 816)
BMS3h-37-11
GAGGTGCAGCTGTTGGAGTCTGGGGGAGGCTTGGTACAGCCTGGGGGGTCCCTGCGTCTCTCCTGTGCAGCCTCCGGAT
TCACCTTTGAGTGGTATGAGATGCAGTGGGTCCGCAAGGCTCCAGGGAAGGGTCTAGAGTGGGTCTCAGCGATTTCTGG
TGATGGTTATCGTACATACTACGCAGACTCCGTGAAAGGCCGGTTCACCATCTCCCGCGACAATTCCAAGAACACGCTG
TATCTGCAAATGAACAGCCTGCGTGCCGAGGACACCGCGGTATATTACTGTGCGAAAGAGCTTGGGTATTTTGACTACA
GGGGTCGGGGAACCCTGGTCACCGTCTCGAGC (SEQ ID NO: 817)
BMS3h-37-12
GAGGTGCAGCTGTTGGAGTCTGGGGGAGGCTTGGTACAGCCTGGGGGGTCCATGCGTCTCTCCTGTGCAGCCTCCGGAT
TCACCTTTGAGTGGTATGAGATGCAGTGGGTCCGCCGGGCTCCAGGGAAGGGTCTAGAGTGGGTCTCAGCGATTTCTGG
TGATGGTTATCGTACATACTACGCAGACTCCGTGAAAGGCCGGTTCACCATCTCCCGCGACAATTCCAAGAACACGCTG
TATCTGCAAATGAACAGCCTGCGTGCCGAGGACACCGCGGTATATTACTGTGCGAAAGAGCTTGGGTATTTTGACTACA
GGGGTCGGGGAACCCTGGTCACCGTCTCGAGC (SEQ ID NO: 818)
BMS3h-37-201
GAGGTGCAGCTGTTGGAGTCTGGGGGAGGCTTGGTACAGCCTGGGGGGTCCCTGCGTCTCTCCTGTGCAGCCTCCGGAT
TCACCTTTGAGTGGTATGAGATGCAGTGGGTCCGCCGGGCTCCAGGGAAGGGATTAGAGTGGGTCTCAATGATTTCCGG
GGATGGTTATCGTACATACTACGCAGACTCCGTGAAAGGCCGGTTCACCATCTCCCGCGACAATTCCAAGAACACGCTG
TATCTGCAAATGAACAGCCTGCGTGCCGAGGACACCGCGGTATATTACTGTGCGAAAGAGCTTGGGTATTTTGACTACT
GGGGTCGGGGAACCCTGGTCACCGTCTCGAGC (SEQ ID NO: 819)
BMS3h-37-202
GAGGTGCAGCTGTTGGAGTCTGGGGGAGGCTTGGTACAGCCTGGGGGGTCCCTGCGTCTCTCCTGTGCAGCCTCCGGAT
TCACCTTTGAGTGGTATGAGATGCAGTGGGTCCGCCGGGCTCCAGGGAAGGGACTAGAGTGGGTCTCAGCGATTTCTGG
TGACGGTTGGCGCACATACTACGCAGACTCCGTGAAAGGCCGGTTCACCATCTCCCGCGACAATTCCAAGAACACGCTG
TATCTGCAAATGAACAGCCTGCGTGCCGAGGACACCGCGGTATATTACTGTGCGAAAGAGCTTGGGTATTTTGACTACT
GGGGTCGGGGAACCCTGGTCACCGTCTCGAGC (SEQ ID NO: 820)
BMS3h-37-203
GAGGTGCAGCTGTTGGAGTCTGGGGGAGGCTTGGTACAGCCTGGGGGGTCCCTGCGTCTCTCCTGTGCAGCCTCCGGAT
TCACCTTTGGGTGGTATGAGATGCAGTGGGTCCGCCGGGCTCCAGGGAAGGGACTAGAGTGGGTCTCAGCGATTTCTGG
TGATGGTTATCGTACATACTACGCAGACTCCGTGAAAGGCCGGTTCACCATCTCCCGCGACAATTCCAAGAACACGCTG
TATCTGCAAATGAACAGCCTGCGTGCCGAGGACACCGCGGTATATTACTGTGCGAAAGAGCTGCTCTACTTTGACTACT
GGGGTCGGGGAACCCTGGTCACCGTCTCGAGC (SEQ ID NO: 821)
BMS3h-37-204
GAGGTGCAGCTGTTGGAGTCTGGGGGAGGCTTGGTACAGCCTGGGGGGTCCCTGCGTCTCTCCTGTGCAGCCTCCGGAT
TCACCTTTGAGTGGTATGAGATGCAGTGGGTCCGCCGGGCTCCAGGGAAGGGACTAGAGTGGGTCTCAGCGATTTCTGG
TGATGGTTATCGTACATACTACGCAGACTCCGTGAAAGGCCGGTTCACCATCTCCCGCGACAATTCCAAGAACACGCTG
TATCTGCAAATGAACAGCCTGCGTGCCGAGGACACCGCGGTATATTACTGTGCGAAAGAGCTGGGGTTCTTTGACTACT
GGGGTCGGGGAACCCTGGTCACCGTCTCGAGC (SEQ ID NO: 822)
BMS3h-37-205
GAGGTGCAGCTGTTGGAGTCTGGGGGAGGCTTGGTACAGCCTGGGGGGTCCCTGCGTCTCTCCTGTGCAGCCTCCGGAT
TCACCTTTGAGTGGTATGAGATGCAGTGGGTCCGCCGGGCTCCAGGGAAGGGACTAGAGTGGGTCTCAGCGATTTCTGG
TGATGGTTATCGTACATACTACGCAGACTCCGTGAAAGGCCGGTTCACCATCTCCCGCGACAATTCCAAGAACACGCTG
TATCTGCAAATGAACAGCCTGCGTGCCGAGGACACCGCGGTATATTACTGTGCGAAAGAGTTGGAGTATTTTGACTACT
GGGGTCGGGGAACCCTGGTCACCGTCTCGAGC (SEQ ID NO: 823)
BMS3h-37-206
GAGGTGCAGCTGTTGGAGTCTGGGGGAGGCTTGGTACAGCCTGGGGGGTCCCTGCGTCTCTCCTGTGCAGCCTCCGGAT
TCACCTTTGAGTGGTATGAGATGCAGTGGGTCCGCCGGGCTCCAGGGAAGGGACTAGAGTGGGTCTCAGCGATTTCTGG
TGATGGTTATCGTACATACTACGCAGACTCCGTGAAAGGCCGGTTCACCATCTCCCGCGACAATTCCAAGAACACGCTG
TATCTGCAAATGAACAGCCTGCGTGCCGAGGATACCGCGGTATATTACTGTGCGAAAGGGTTGGAGTATTTTGACTACT
GGGGTCGGGGAACCCTGGTCACCGTCTCGAGC (SEQ ID NO: 824)
BMS3h-37-207
GAGGTGCAGCTGTTGGAGTCTGGGGGAGGCTTGGTACAGCCTGGGGGGTCCCTGCGTCTCTCCTGTGCAGCCTCCGGAT
TCACCTTTGAGTGGTATGAGATGCAGTGGGTCCGCCGGGCTCCAGGGAAGGGACTAGAGTGGGTCTCAGCGATTTCTGG
TGATGGTTATCGTACATACTACGCAGACTCCGTGAAAGGCCGGTTCACCATCTCCCGCGACAATTCCAAGAACACGCTG
TATCTGCAAATGAACAGCCTGCGTGCCGAGGACACCGCGGTATATTACTGTGCGAAAGAGCTGGCCTTCTTTGACTACT
GGGGTCGGGGAACCCTGGTCACCGTCTCGAGC (SEQ ID NO: 825)
BMS3h-37-208
GAGGTGCAGCTGTTGGAGTCTGGGGGAGGCTTGGTACAGCCTGGGGGGTCCCTGCGTCTCTCCTGTGCAGCCTCCGGAT
TCACCTTTGAGTGGTATGAGATGCAGTGGGTCCGCCGGGCTCCAGGGAAGGGACTAGAGTGGGTCTCAGCGATTTCTGG
TGATGGTTATCGTACATACTACGCAGACTCCGTGAAAGGCCGGTTCACCATCTCCCGCGACAATTCCAAGAACACGCTG
TATCTGCAAATGAACAGCCTGCGTGCCGAGGACACCGCGGTATATTACTGTGCGAAAGAGCTCTTGTACTTTGACTACT
GGGGTCGGGGAACCCTGGTCACCGTCTCGAGC (SEQ ID NO: 826)
BMS3h-37-209
GAGGTGCAGCTGTTGGAGTCTGGGGGAGGCTTGGTACAGCCTGGGGGGTCCCTGCGTCTCTCCTGTGCAGCCTCCGGAT
TCACCTTTGAGTGGTATGAGATGCAGTGGGTCCGCCGGGCTCCAGGGAAGGGACTAGAGTGGGTCTCAGCGATTTCTGG
TGATGGTTATCGTACATACTACGCAGACTCCGTGAAAGGCCGGTTCACCATCTCCCGCGACAATTCCAAGAACACGCTG
TATCTGCAAATGAACAGCCTGCGTGCCGAGGACACCGCGGTATATTACTGTGCGAAAGAGTTGGAGTTCTTTGACTACT
GGGGTCGGGGAACCCTGGTCACCGTCTCGAGC (SEQ ID NO: 827)
BMS3h-37-210
GAGGTGCAGCTGTTGGAGTCTGGGGGAGGCTTGGTACAGCCTGGGGGGTCCCTGCGTCTCTCCTGTGCAGCCTCCGGAT
TCACCTTTGAGTGGTATGAGATGCAGTGGGTCCGCCGGGCTCCAGGGAAGGGACTAGAGTGGGTCTCAGCGATTTCTGG
TGATGGTTATCGTACATACTACGCAGACTCCGTGAAAGGCCGGTTCACCATCTCCCGCGACAATTCCAAGAACACGCTG
TATCTGCAAATGAACAGCCTGCGTGCCGAGGACACCGCGGTATATTACTGTGCGAAAGAGCTGCAGTTCTTTGACTACT
GGGGTCGGGGAACCCTGGTCACCGTCTCGAGC (SEQ ID NO: 828)
BMS3h-37-211
GAGGTGCAGCTGTTGGAGTCTGGGGGAGGCTTGGTACAGCCTGGGGGGTCCCTGCGTCTCTCCTGTGCAGCCTCCGGAT
TCACCTTTGAGTGGTATGAGATGCAGTGGGTCCGCCGGGCTCCAGGGAAGGGACTAGAGTGGGTCTCAGCGATTTCTGG
TGATGGTTATCGTACATACTACGCAGACTCCGTGAAAGGCCGGTTCACCATCTCCCGCGACAATTCCAAGAACACGCTG
TATCTGCAAATGAACAGCCTGCGTGCCGAGGATACCGCGGTATATTACTGTGCGAAAGAGCTGCTCTTCTTTGACTACT
GGGGTCGGGGAACCCTGGTCACCGTCTCGAGC (SEQ ID NO: 829)
BMS3h-37-212
GAGGTGCAGCTGTTGGAGTCTGGGGGAGGCTTGGTACGGCCTGGGGGGTCCCTGCGTCTCTCCTGTGCAGCCTCCGGAT
TCACCTTTGAGTGGTATGAGATGCAGTGGGTCCGCCGGGCTCCAGGGAAGGGACTAGAGTGGGTCTCAGCGATTTCTGG
TGATGGTTATCGTACATACTACGCAGACTCCGTGAAAGGCCGGTTCACCATCTCCCGCGACAATTCCAAGAACACGCTG
TATCTGCAAATGAACAGCCTGCGTGCCGAGGATACCGCGGTATATTACTGTGCGAAAGAGTTGGAGTTCTTTGACTACT
GGGGTCGGGGAACCCTGGTCACCGTCTCGAGC (SEQ ID NO: 830)
BMS3h-37-213
GAGGTGCAGCTGTTGGAGTCTGGGGGAGGCTTGGTACAGCCTGGGGGGTCCCTGCGTCTCTCCTGTGCAGCCTCCGGAT
TCACCTTTGAGTGGTATGAGATGCAGTGGGTCCGCCGGGCTCCAGGGAAGGGACTAGAGTGGGTCTCAGCGATTTCTGG
TGATGGTTATCGTACATACTACGCAGACTCCGTGAAAGGCCGGTTCACCATCTCCCGCGACAATTCCAAGAACACGCTG
TATCTGCAAATGAACAGCCTGCGTGCCGAGGACACCGCGGTATATTACTGTGCGAAAGAGTTGCTCTTCTTTGACTACC
GGGGTCGGGGAACCCTGGTCACCGTCTCGAGC (SEQ ID NO: 831)
BMS3h-37-214
GAGGTGCAGCTGTTGGAGTCTGGGGGAGGCTTGGTACAGCCTGGGGGGTCCCTGCGTCTCTCCTGTGCAGCCTCCGGAT
TCATCTTTGAGTGGTATGAGATGCAGTGGGTCCGCCGGGCTCCAGGGAAGGGACTAGAGTGGGTCTCAGCGATTTCTGG
TGATGGTTATCGTACATACTACGCAGACTCCGTGAAAGGCCGGTTCACCATCTCCCGCGACAATTCCAAGAACACGCTG
TATCTGCAAATGAACAGCCTGCGTGCCGAGGATACCGCGGTATATTACTGTGCGAAAAACTTGGAGTATTTTGACTACT
GGGGTCGGGGAACCCTGGTCACCGTCTCGAGC (SEQ ID NO: 832)
BMS3h-37-215
GAGGTGCGGCTGTTGGAGTCTGGGGGAGGCTTGGTACAGCCTGGGGGGTCCCTGCGTCTCTCCTGTGCAGCCTCCGGAT
TCACCTTTGAGTGGTATGAGATGCAGTGGGTCCGCCGGGCTCCAGGGAAGGGACTAGAGTGGGTCTCAGCGATTTCTGG
TGATGGTTATCGTACATACTACGCAGACTCCGTGAAAGGCCGGTTCACCATCTCCCGCGACAATTCCAAGAACACGCTG
TATCTGCAAATGAACAGCCTGCGTGCCGAGGACACCGCGGTATATTACTGTGCGAAAGAGTTGCAGTTCTTTGACTACT
GGGGTCGGGGAACCCTGGTCACCGTCTCGAGC (SEQ ID NO: 833)
BMS3h-38-1
GAGGTGCAGCTGTTGGGGTCTGGGGGAGGCTTGGTACAGCCTGGGGGGTCCCTGCGTCTCTCCTGTGCAGCCTCCGGAT
TCACCTTTGAGGAGGAGGAGATGATTTGGGTCCGCCAGGCTCCAGGGAAGGGTCTAGAGTGGGTCTCAGCTATTAGTGG
TAGTGGTGGTAGCACATACTACGCAGACTCCGTGAAGGGCCGGTTCACCATCTCCCGCGACAATTCCAAGAACACGCTG
TATCTGCAAATGAACAGCCTGCGTGCCGAGGATACCGCGGTATATTACTGTTCGAAAGAGCCGTTTCGTTTTGACTACT
GGGGTCAGGGAACCCTGGTCACCGTCTCGAGC (SEQ ID NO: 834)
BMS3h-38-2
GAGGTGCAGCTGTTGGCGTCTGGGGGAGGCTTGGTACAGCCTGGGGGGTCCCTGCGTCTCTCCTGCGCAGCCTCCGGAT
TCACCTTTGAGGAGGAGGAGATGATTTGGGTCCGTCAGGCTCCAGGGAAGGGTCTAGAGTGGGTCTCAGCTATTAGTGG
TAGTGGTGGTAGCACATACTACGCAGACTCCGTGAAGGGCCGGTTCACCATCTCCCGCGACAATTCCAAGAACACGCTG
TATCTGCAAATGAACAGCCTGCGTGCCGAGGATACCGCGGTATATTACTGTGGGAAAGAGCCGTTTCGTTATGACTACT
GGGGTCAGGGAACCCTGGTCACCGTCTCGAGC (SEQ ID NO: 835)
BMS3h-38-3
GAGGTGCAGCTGTTGGCGTCTGGGGGAGGCTTGGTACAGCCTGGGGGGTCCCTGCGTCTCTCCTGTGCAGCCTCCGGAT
TCACCTTTGAGGAGGAGGAGATGATTTGGGTCCGCCAGGCTCCAGGGAAGGGTCTAGAGTGGATCTCAGCTATTAGTGG
AAGTGGTGGTAGCACATACTACGCAGACTCCGTGAAGGGCCGGTTTACCATCTCCCGCGACAATTCCAAGAACACGCTG
TATCTGCAAATGAACAGCCTGCGTGCCGAGGATACCGCGGTATATTACTGTGGGAAAGAGCCGTTTCGTTTTGACTACT
GGGGTCAGGGAACCCTGGTCACCGTCTCGAGC (SEQ ID NO: 836)
BMS3h-38-4
GAGGTGCAGCTGTTGGATCCTGGGGGAGGCTTGGTACAGCCTGGGGGGTCCCTGCGTCTCTCCTGTGCAGCCTCCGGAT
TCACCTTTGGGAAGGAGGAGATGATTTGGGTCCGCCAGGCTCCAGGGAAGGGTCTAGAGTGGGTCTCATCTATTAGTGG
TAGTGGTGGTAGCACATACTACGCAGACTCCGTGAAGGGCCGGTTCACCATCTCCCGCGACAATTCCAGGAACACGCTG
TATCTGCAAATGAACAGCCTGCGTGCCGAGGATACCGCGGTATATTACTGTGGGAAAGAGCCGTTTCGTTTTGACTACT
GGGGTCAGGGAACCCTGGTCACCGTCTCGAGC (SEQ ID NO: 837)
BMS3h-38-5
GAGGTGCAGCTGTTGGGGTCTGGGGGAGGCTTGGTACAGCCTGGGGGGTCCCTGCGTCTCTCCTGTGCAGCCTCCGGAT
TCACCTTTGAGGAGGAGGAGATGATTTGGGTCCGCCAGGCTCCAGGGAAGGGTCTAGAGTGGGTCTCAGCTATTAGTGG
TAGTGGTGGTAGCACATACTACGCAGACTCCGTGAAGGGCCGGTTCACCATCTCCCGCGACAATTCCAAGAACACGCTG
TATCTGCAAATGAACAGCCTGCGTGCCGAGGATACCGCGGTATATTACTGTGGGAAAGAGCCGTTTCGTTTTGACTACT
GGGGTCAGGGAACCCTGGTCACCGTCTCGAGC (SEQ ID NO: 838)
BMS3h-38-6
GAGGTGCAGCTGTTGGAGCCTGGGGGAGGCTTGGTACAGCCTGGGGGCTCCCTGCGTCTCTCCTGTGCAGCCTCCGGAT
TCACCTTTGAGGAGGAGGAGATGATTTGGGTCCGCCAGGCTCCAGGGAAGGGTCTAGAGTGGGTCTCAGCTATTAGTGG
TAGTGGTGGTAGCACATACTACGCAGACTCCGTGAAGGGCCGGTTCACCATCTCCCGCGACAATTCCAAGAACACGCTG
TATCTGCTAATGAACAGCCTGCGTGCCGAGGATACCGCGGTATATTACTGTTCGAAAGAGCCGTTTCGTTTTGACTACT
GGGGTCAGGGAGCCCTGGTCACCGTCTCGAGC (SEQ ID NO: 839)
BMS3h-38-7
GAGGTGCAGCTGTTGGATCCTGGGGGAGGCTTGGTACAGCCTGGGGGGTCCCTGCGTCTCTCCTGTGCAGCCTCCGGAT
TCACCTTTGGGAAGGAGGAGATGATTTGGGTCCGCCAGGCTCCAGGGAAGGGTCTAGAGTGGGTCTCATCTATTAGTGG
TAGTGGTGGTAGCACATACTACGCAGACTCCGTTAAGGGCCGGTTCACCATCTCCCGCGACAATTCCAAGAACACGCTG
TATCTGCAAATGAACAGCCTGCGTGCCGAGGATACCGCGGTATATTACTGTGCGAAAGAGCCGTTACGTTTTGACTACT
GGGGTCAGGGAACCCTGGTCACCGTCTCGAGC (SEQ ID NO: 840)
BMS3h-38-8
GAGGTGCAGCTGTTGGAGTCTGGGGGAGGCTTGGTACAGCCTGGGGGGTCCCTGCGTCTCTCCTGTGCAGCCTCCGGAT
TCACCTTTGAGGAGGAGGAGATGATCTGGGTCCGCCAGGCTCCTGGGAAGGGTCTAGAGTGGATCTCAGCTATTAGTGG
TAGTGGTGGTAGCACATACTACGCAGACTCCGTGAAGGGCCGGTTCACCATCCACCGCGACAATTCTAAGAACACTCTG
TATCTGCAAATGAACAGCCTGCGTGCCGAGGATACCGCGGTATATTACTGTTCGAAAGAGCCGTTTCGTTTTGACTACA
GGGGTCTGGGAACCTTGGTCACCGTCTCGAGC (SEQ ID NO: 841)
BMS3h-38-9
GAGGTGCAGCTGTTGGATCCTGGGGGAGGCTTGGTACAGCCTGGGGGGTCCCTGCGTCTCTCCTGTGCAGCCTCCGGAT
TCACCTTTGGGAAGGAGGAGATGATTTGGGTCCGCCAGGCTCCAGGGAAGGGTCTAGAGTGGGTCTCATCTATTAGTGG
TAGTGGTGGTAGCACATACTACGCAGACTCCGTGAAGGGCCGGTTCACCATCTCCCGCGACAATTCCAGGAACACGCTG
TATCTGCAAATGAACAGCCTGCGTGCCGAGGATACCGCGGTATATTACTGTGCGAAAGAGCCGTTACGTTTTGACTACT
GGGGTCAGGGGACCCTGGTCACCGTCTCGAGC (SEQ ID NO: 842)
BMS3h-38-10
GAGGTGCAGCTGTTGGATTCTGGGGGAGGCTTTGTACAGCCTGGGGGGTCCCTGCGTCTCTCCTGTGCAGCCTCCGGAT
TCACCTTTGAGGAGGAGGAGATGATTTGGGTCCGCCAGGCTCCAGGGAAGGGTCTAGAGTGGATCTCAGCTATTAGTGG
TAGTGGTGGTAGCACATACTACGCAGACTCCGTGAAGGGCCGGTTCACCATCTCCCGCGACAATTCCAAGAACACGCTG
TATCTGCAAATGAACAGCCTGCGTGCCGAGGATACCGCGGTGTATTACTGTGCGAAAGAGCCGTTTCGTTTTGACTACT
GGGGTCAGGGAACCCTGGTCACCGTCTCGAGC (SEQ ID NO: 843)
BMS3h-38-11
GAGGTGCAGCTGTTGGATCCTGGGGGAGGCTTGGTACAGCCTGGGGGGTCCCTGCGTCTCTCCTGTGCAGCCTCCGGAT
TCACCTTTGAGGAGGAGGAGATGATTTGGGTCCGCCAGGCTCCAGGGAAGGGTCTAGAGTGGATCTCAGCTATTAGTGG
TAGTGGTGGTAGCACATACTACGCAGACTCCGTGAAGGGCCGGTTCACCATCTCCCGCGACAATTCCAATAACACGCTG
TATCTGCAAATGAACAGCCTGCGTGCCGAGGATACCGCGGTATATTACTGTGGGAGAGAGCCGTTTCGTTTTGACTACT
GGGGTCAGGGAACCCTGGTCACCGTCTCGAGC (SEQ ID NO: 844)
BMS3h-38-12
GAGGTGCGGCTGTTGGAGTCTGGGGAAGGCTTGGTACAGCCTGGGGGGTCCCTGCGTCTCTCCTGTGCAGCCTCCGGAT
TCACCTTTGAGGAGGAGGAGATGATTTGGGTCCGCCAGGCTCCAGGGAAGGGTCTAGAGTGGGTCTCAGCTATTAGTGG
TAGTGGTGGTAGCACATACTACGCAGACTCCGTGAAGGGCCGGTTCACCATCTCACGCGACAATTCCAAGAACACGCTG
TATCTGCAAATGAACAGCCTGCGTGCCGAGGATACCGCGGTATATTACTGTGGGAAAGAGCCGTTTCGTTTTGACTACT
GGGGTCAGGGAACCCTGGTCACCGTCTCGAGC (SEQ ID NO: 845)
BMS3h-38-13
GAGGTGCAGCAGTTGGAGTCTGGGGGAGGCCTGGTACAGCCTGGGGGGTCCCTGCGTCTCTCCTGTGCAGCCTCCGGAT
TCACCTTTGAGGAGGAGGAGATGATTTGGGTCCGCCAGGCTCCAGGGAAGGGTCTAGAGTGGGTCTCAGCTATTAGTGG
TAGTGGTGGTAGCACATACTACGCAGACTCCGTGAAGGGCCGGTTCACCATCTCCCGCGACAATTCCAAGAACACGCTG
TATCTGCAAATGAACAGCCTGCGTGCCGAGGATACCGCGGTATATTACTGTGGGAAAGAGCCGTTTCGTTTTGACTACT
GGGGTCAGGGAACCCTGGTCACCGTCTCGAGC (SEQ ID NO: 846)
BMS3h-38-201
GAGGTGCAGCTGTTGGCGTCTGGGGGAGGCTTGGTACAGCCTGGGGGGTCCCTGCGTCTCTCCTGCGCAGCCTCCGGAT
TCACCTTTGAGGAGGAGGAGATGATTTGGGTCCGTCAGGCTCCAGGGAAGGGTCTAGAGTGGGTCTCAGCTATTAGTGG
TAGTGGTGGTAGCACATACTACGCAGACTCCGTGAAGGGCCGGTTCACCATCTCCCGCGACAATTCCAAGAACACGCTG
TATCTGCAAATGAACAGCCTGCGTGCCGAGGATACCGCGGTATATTACTGTGGGAAAGAGCCGTTCTACTACGACTACT
GGGGTCAGGGAACCCTGGTCACCGTCTCGAGC (SEQ ID NO: 847)
BMS3h-38-202
GAGGTGCAGCTGTTGGCGTCTGGGGGAGGCTTGGTACAGCCTGGGGGGTCCCTGCGTCTCTCCTGCGCAGCCTCCGGAT
TCACCTTTGAGGAGGAGGAGATGATTTGGGTCCGTCAGGCTCCAGGGAAGGGTCTAGAGTGGGTCTCAGCTATTAGTGG
TAGTGGTGGTAGCACATACTACGCAGACTCCGTGAAGGGCCGGTTCACCATCTCCCGCGACAATTCCAAGAACACGCTG
TATCTGCAAATGAACAGCCTGCGTGCCGAGGATACCGCGGTATATTACTGTGGGAAAGAGCCGTTCTACTTCGACTACT
GGGGTCAGGGAACCCTGGTCACCGTCTCGAGC (SEQ ID NO: 848)
BMS3h-38-203
GAGGTGCAGCTGTTGGCGTCTGGGGGAGGCTTGGTACAGCCTGGGGGGTCCCTGCGTCTCTCCTGCGCAGCCTCCGGAT
TCACCTTTGAGGAGAAGGAGATGATTTGGGTCCGTCAGGCTCCAGGGAAGGGTCTAGAGTGGGTCTCAGCTATTAGTGG
TAGTGGTGGTAGCACATACTACGCAGACTCCGTGAAGGGCCGGTTCACCATCTCCCGCGACAATTCCAAGAACACGCTG
TATCTGCAAATGAACAGCCTGCGTGCCGAGGATACCGCGGTATATTACTGTGGGAAAGAGCCGTTCTTCTACGACTACT
GGGGTCAGGGAACCCTGGTCACCGTCTCGAGC (SEQ ID NO: 849)
BMS3h-38-204
GAGGTGCAGCTGTTGGCGTCTGGGGGAGGCTTGGTACAGCCTGGGGGGTCCCTGCGTCTCTCCTGCGCAGCCTCCGGAT
TCACCTTTCCCCAGGAGGAGATGATTTGGGTCCGTCAGGCTCCAGGGAAGGGTCTAGAGTGGGTCTCAGCTATTAGTGG
TAGTGGTGGTAGCACATACTACGCAGACTCCGTGAAGGGCCGGTTCACCATCTCCCGCGACAATTCCAAGAACACGCTG
TATCTGCAAATGAACAGCCTGCGTGCCGAGGATACCGCGGTATATTACTGTGGGAAAGAGCCGTTTCGTTATGACTACT
GGGGTCAGGGAACCCTGGTCACCGTCTCGAGC (SEQ ID NO: 850)
BMS3h-38-205
GAGGTGCAGCTGTTGGCGTCTGGGGGAGGCTTGGTACAGCCTGGGGGGTCCCTGCGTCTCTCCTGCGCAGCCTCCGGAT
TCACCTTTTTCGCCGCCGAGATGATTTGGGTCCGCCAGGCTCCAGGGAAGGGTCTAGAGTGGGTCTCAGCTATTAGTGG
TAGTGGTGGTAGCACATACTACGCAGACTCCGTGAAGGGCCGGTTCACCATCTCCCGCGACAATTCCAAGAACACGCTG
TATCTGCAAATGAACAGCCTGCGTGCCGAGGATACCGCGGTATATTACTGTGGGAAAGAGCCGTTTCGTTATGACTACT
GGGGTCAGGGAACCCTGGTCACCGTCTCGAGC (SEQ ID NO: 851)
BMS3h-38-206
GAGGTGCAGCTGTTGGCGTCTGGGGGAGGCTTGGTACAGCCTGGGGGGTCCCTGCGTCTCTCCTGCGCAGCCTCCGGAT
TCACCTTTGAGGAGGAGGAGATGATTTGGGTCCGCCAGGCTCCAGGGAAGGGTCTAGAGTGGGTCTCAGCTATTAGTAG
GCCCGGTACGAGCACATACTACGCAGACTCCGTGAAGGGCCGGTTCACCATCTCCCGCGACAATTCCAAGAACACGCTG
TATCTGCAAATGAACAGCCTGCGTGCCGAGGATACCGCGGTATATTACTGTGGGAAAGAGCCGTTTCGTTATGACTACT
GGGGTCAGGGAACCCTGGTCACCGTCTCGAGC (SEQ ID NO: 852)
BMS3h-38-207
GAGGTGCAGCTGTTGGCGTCTGGGGGAGGCTTGGTACAGCCTGGGGGGTCCCTGCGTCTCTCCTGCGCAGCCTCCGGAT
TCACCTTTGAGGAGGAGGAGATGATTTGGGTCCGCCAGGCTCCAGGGAAGGGTCTAGAGTGGGTCTCAGCTATTAGTCG
GATGGGTTTCAGCACATACTACGCAGACTCCGTGAAGGGCCGGTTCACCATCTCCCGCGACAATTCCAAGAACACGCTG
TATCTGCAAATGAACAGCCTGCGTGCCGAGGATACCGCGGTATATTACTGTGGGAAAGAGCCGTTTCGTTATGACTACT
GGGGTCAGGGAACCCTGGTCACCGTCTCGAGC (SEQ ID NO: 853)
BMS3h-38-208
GAGGTGCAGCTGTTGGCGTCTGGGGGAGGCTTGGTACAGCCTGGGGGGTCCCTGCGTCTCTCCTGCGCAGCCTCCGGAT
TCACCTTTGAGGAGGAGGAGATGATTTGGGTCCGCCAGGCTCCAGGGAAGGGTCTAGAGTGGGTCTCAGCTATTAGTCG
GTGGGGTCACAGCACATACTACGCAGACTCCGTGAAGGGCCGGTTCACCATCTCCCGCGACAATTCCAAGAACACGCTG
TATCTGCAAATGAACAGCCTGCGTGCCGAGGATACCGCGGTATATTACTGTGGGAAAGAGCCGTTTCGTTATGACTACT
GGGGTCAGGGAACCCTGGTCACCGTCTCGAGC (SEQ ID NO: 854)
BMS3h-38-209
GAGGTGCAGCTGTTGGCGTCTGGGGGAGGCTTGGTACAGCCTGGGGGGTCCCTGCGTCTCTCCTGCGCAGCCTCCGGAT
TCACCTTTGAGGAGGAGGAGATGATTTGGGTCCGCCAGGCTCCAGGGAAGGGTCTAGAGTGGGTCTCAGCTATTAGTCG
CCTCGGTTGGAGCACATACTACGCAGACTCCGTGAAGGGCCGGTTCACCATCTCCCGCGACAATTCCAAGAACACGCTG
TATCTGCAAATGAACAGCCTGCGTGCCGAGGATACCGCGGTATATTACTGTGGGAAAGAGCCGTTTCGTTATGACTACT
GGGGTCAGGGAACCCTGGTCACCGTCTCGAGC (SEQ ID NO: 855)
BMS3h-38-210
GAGGTGCAGCTGTTGGCGTCTGGGGGAGGCTTGGTACAGCCTGGGGGGTCCCTGCGTCTCTCCTGCGCAGCCTCCGGAT
TCACCTTTGAGGAGGAGGAGATGATTTGGGTCCGTCAGGCTCCAGGGAAGGGTCTAGAGTGGGTCTCAGCTATTAGTCG
CTGGGGTGCCAGCACATACTACGCAGACTCCGTGAAGGGCCGGTTCACCATCTCCCGCGACAATTCCAAGAACACGCTG
TATCTGCAAATGAACAGCCTGCGTGCCGAGGATACCGCGGTATATTACTGTGGGAAAGAGCCGTTTCGTTATGACTACT
GGGGTCAGGGAACCCTGGTCACCGTCTCGAGC (SEQ ID NO: 856)
BMS3h-38-211
GAGGTGCAGCTGTTGGCGTCTGGGGGAGGCTTGGTACAGCCTGGGGGGTCCCTGCGTCTCTCCTGCGCAGCCTCCGGAT
TCACCTTTGAGGAGGAGGAGATGATTTGGGTCCGTCAGGCTCCAGGGAAGGGTCTAGAGTGGGTCTCAGCTATTAGTAG
GCAGGGTGGGAGCACATACTACGCAGACTCCGTGAAGGGCCGGTTCACCATCTCCCGTGACAATTCCAAGAACACGCTG
TATCTGCAAATGAACAGCCTGCGTGCCGAGGATACCGCGGTATATTACTGTGGGAAAGAGCCGTTTCGTTATGACTACT
GGGGTCAGGGAACCCTGGTCACCGTCTCGAGC (SEQ ID NO: 857)
BMS3h-38-212
GAGGTGCAGCTGTTGGCGTCTGGGGGAGGCTTGGTACAGCCTGGGGGGTCCCTGCGTCTCTCCTGCGCAGCCTCCGGAT
TCACCTTTGAGGAGGAGGAGATGATTTGGGTCCGCCAGGCTCCAGGGAAGGGTCTAGAGTGGGTCTCAGCTATTAGTGT
GTCCGGTTGGAGCACATACTACGCAGACTCCGTGAAGGGCCGGTTCACCATCTCCCGCGACAATTCCAAGAACACGCTG
TATCTGCAAATGAACAGCCTGCGTGCCGAGGATACCGCGGTATATTACTGTGGGAAAGAGCCGTTTCGTTATGACTACT
GGGGTCAGGGAACCCTGGTCACCGTCTCGAGC (SEQ ID NO: 858)
BMS3h-38-213
GAGGTGCAGCTGTTGGCGTCTGGGGGAGGCTTGGTACAGCCTGGGGGGTCCCTGCGTCTCTCCTGCGCAGCCTCCGGAT
TCACCTTTGAGGAGGAGGAGATGATTTGGGTCCGCCAGGCTCCAGGGAAGGGTCTAGAGTGGGTCTCAGCTATTAGTCG
GTGGGGTTGGAGCACATACTACGCAGACTCCGTGAAGGGCCGGTTCACCATCTCCCGCGACAATTCCAAGAACACGCTG
TATCTGCAAATGAACAGCCTGCGTGCCGAGGATACCGCGGTATATTACTGTGGGAAAGAGCCGTTTCGTTATGACTACT
GGGGTCAGGGAACCCTGGTCACCGTCTCGAGC (SEQ ID NO: 859)
BMS3h-38-214
GAGGTGCAGCTGTTGGCGTCTGGGGGAGGCTTGGTACAGCCTGGGGGGTCCCTGCGTCTCTCCTGCGCAGCCTCCGGAT
TCACCTTTGAGGAGGAGGAGATGATTTGGGTCCGCCAGGCTCCAGGGAAGGGTCTAGAGTGGGTCTCAGCTATTAGTCG
GAACGGTCTGAGCACATACTACGCAGACTCCGTGAAGGGCCGGTTCACCATCTCCCGCGACAATTCCAAGAACACGCTG
TATCTGCAAATGAACAGCCTGCGTGCCGAGGATACCGCGGTATATTACTGTGGGAAAGAGCCGTTTCGTTATGACTACT
GGGGTCAGGGAACCCTGGTCACCGTCTCGAGC (SEQ ID NO: 860)
BMS3h-38-215
GAGGTGCAGCTGTTGGCGTCTGGGGGAGGCTTGGTACAGCCTGGGGGGTCCCTGCGTCTCTCCTGCGCAGCCTCCGGAT
TCACCTTTGAGGAGGAGGAGATGATTTGGGTCCGCCAGGCTCCAGGGAAGGGTCTAGAGTGGGTCTCAGCTATTAGTGG
GCTGGGTTGGAGCACATACTACGCAGACTCCGTGAAGGGCCGGTTCACCATCTCCCGCGACAATTCCAAGAACACGCTG
TATCTGCAAATGAACAGCCTGCGTGCCGAGGATACCGCGGTATATTACTGTGGGAAAGAGCCGTTTCGTTATGACTACT
GGGGTCAGGGAACCCTGGTCACCGTCTCGAGC (SEQ ID NO: 861)
BMS3h-38-216
GAGGTGCAGCTGTTGGCGTCTGGGGGAGGCTTGGTACAGCCTGGGGGGTCCCTGCGTCTCTCCTGCGCAGCCTCCGGAT
TCACCTTTGAGGAGGAGGAGATGATTTGGGTCCGCCAGGCTCCAGGGAAGGGTCTAGAGTGGGTCTCAGCTATTAGTGC
GTTGGGTTGGAGCACATACTACGCAGACTCCGTGAAGGGCCGGTTCACCATCTCCCGCGACAATTCCAAGAACACGCTG
TATCTGCAAATGAACAGCCTGCGTGCCGAGGATACCGCGGTATATTACTGTGGGAAAGAGCCGTTTCGTTATGACTACT
GGGGTCAGGGAACCCTGGTCACCGTCTCGAGC (SEQ ID NO: 862)
BMS3h-38-217
GAGGTGCAGCTGTTGGCGTCTGGGGGAGGCTTGGTACAGCCTGGGGGGTCCCTGCGTCTCTCCTGCGCAGCCTCCGGAT
TCACCTTTGAGGAGGAGGAGATGATTTGGGTCCGCCAGGCTCCAGGGAAGGGTCTAGAGTGGGTCTCAGCTATTAGTCG
CAGGGGTTACAGCACATACTACGCAGACTCCGTGAAGGGCCGGTTCACCATCTCCCGCGACAATTCCAAGAACACGCTG
TATCTGCAAATGAACAGCCTGCGTGCCGAGGATACCGCGGTATATTACTGTGGGAAAGAGCCGTTTCGTTATGACTACT
GGGGTCAGGGAACCCTGGTCACCGTCTCGAGC (SEQ ID NO: 863)
BMS3h-38-218
GAGGTGCAGCTGTTGGCGTCTGGGGGAGGCTTGGTACAGCCTGGGGGGTCCCTGCGTCTCTCCTGCGCAGCCTCCGGAT
TCACCTTTGAGGAGGAGGAGATGATTTGGGTCCGTCAGGCTCCAGGGAAGGGTCTAGAGTGGGTCTCAGCTATTAGTAG
GCACGGTTGGAGCACATACTACGCAGACTCCGTGAAGGGCCGGTTCACCATCTCCCGCGACAATTCCAAGAACACGCTG
TATCTGCAAATGAACAGCCTGCGTGCCGAGGATACCGCGGTATATTACTGTGGGAAAGAGCCGTTTCGTTATGACTACT
GGGGTCAGGGAACCCTGGTCACCGTCTCGAGC (SEQ ID NO: 864)
BMS3h-38-219
GAGGTGCAGCTGTTGGCGTCTGGGGGAGGCTTGGTACAGCCTGGGGGGTCCCTGCGTCTCTCCTGCGCAGCCTCCGGAT
TCACCTTTGAGGAGGAGGAGATGATTTGGGTCCGCCAGGCTCCAGGGAAGGGTCTAGAGTGGGTCTCAAGCATTAGCAG
GAGTGGTGGTAGCACATACTACGCAGACTCCGTGAAGGGCCGGTTCACCATCTCCCGCGACAATTCCAAGAACACGCTG
TATCTGCAAATGAACAGCCTGCGTGCCGAGGATACCGCGGTATATTACTGTGGGAAAGAGCCGTTTCGTTATGACTACT
GGGGTCAGGGAACCCTGGTCACCGTCTCGAGC (SEQ ID NO: 865)
BMS3h-38-220
GAGGTGCAGCTGTTGGCGTCTGGGGGAGGCTTGGTACAGCCTGGGGGGTCCCTGCGTCTCTCCTGCGCAGCCTCCGGAT
TCACCTTTGAGGAGGAGGAGATGATTTGGGTCCGCCAGGCTCCAGGGAAGGGTCTAGAGTGGGTCTCAGCTATTAGTCG
GATCGGTAACAGCACATACTACGCAGACTCCGTGAAGGGCCGGTTCACCATCTCCCGCGACAATTCCAAGAACACGCTG
TATCTGCAAATGAACAGCCTGCGTGCCGAGGATACCGCGGTATATTACTGTGGGAAAGAGCCGTTTCGTTATGACTACT
GGGGTCAGGGAACCCTGGTCACCGTCTCGAGC (SEQ ID NO: 866)
BMS3h-38-221
GAGGTGCAGCTGTTGGCGTCTGGGGGAGGCTTGGTACAGCCTGGGGGGTCCCTGCGTCTCTCCTGCGCAGCCTCCGGAT
TCACCTTTGAGGAGGAGGAGATGATTTGGGTCCGCCAGGCTCCAGGGAAGGGTCTAGAGTGGGTCTCAGCTATTAGTGG
GCACGGTTGGAGCACATACTACGCAGACTCCGTGAAGGGCCGGTTCACCATCTCCCGCGACAATTCCAAGAACACGCTG
TATCTGCAAATGAACAGCCTGCGTGCCGAGGATACCGCGGTATATTACTGTGGGAAAGAGCCGTTTCGTTATGACTACT
GGGGTCAGGGAACCCTGGTCACCGTCTCGAGC (SEQ ID NO: 867)
BMS3h-38-222
GAGGTGCAGCTGTTGGCGTCTGGGGGAGGCTTGGTACAGCCTGGGGGGTCCCTGCGTCTCTCCTGCGCAGCCTCCGGAT
TCACCTTTGAGGAGGAGGAGATGATTTGGGTCCGCCAGGCTCCAGGGAAGGGTCTAGAGTGGGTCTCAGCTATTTCGAG
GTGGGGTGGTAGCACATACTACGCAGACTCCGTGAAGGGCCGGTTCACCATCTCCCGCGACAATTCCAAGAACACGCTG
TATCTGCAAATGAACAGCCTGCGTGCCGAGGATACCGCGGTATATTACTGTGGGAAAGAGCCGTTTCGTTATGACTACT
GGGGTCAGGGAACCCTGGTCACCGTCTCGAGC (SEQ ID NO: 868)
BMS3h-38-223
GAGGTGCAGCTGTTGGCGTCTGGGGGAGGCTTGGTACAGCCTGGGGGGTCCCTGCGTCTCTCCTGCGCAGCCTCCGGAT
TCACCTTTGAGGAGGAGGAGATGATTTGGGTCCGTCAGGCTCCAGGGAAGGGTCTAGAGTGGGTCTCAGCTATTAGTGG
TAGTGGTGGTAGCACATACTACGCAGACTCCGTGAAGGGCCGGTTCACCATCTCCCGCGACAATTCCAAGAACACGCTG
TATCTGCAAATGAACAGCCTGCGTGCCGAGGATACCGCGGTATATTACTGTGGGAAAGAGCCGTTCATGTATGACTACT
GGGGTCAGGGAACCCTGGTCACCGTCTCGAGC (SEQ ID NO: 869)
BMS3h-38-224
GAGGTGCAGCTGTTGGCGTCTGGGGGAGGCTTGGTACAGCCTGGGGGGTCCCTGCGTCTCTCCTGCGCAGCCTCCGGAT
TCACCTTTGAGGAGGAGGAGATGATTTGGGTCCGTCAGGCTCCAGGGAAGGGTCTAGAGTGGGTCTCAGCTATTAGTGG
TAGTGGTGGTAGCACATACTACGCAGACTCCGTGAAGGGCCGGTTCACCATCTCCCGCGACAATTCCAAGAACACGCTG
TATCTGCAAATGAACAGCCTGCGTGCCGAGGATACCGCGGTATATTACTGTGGGAAAGAGCCGTTCCCGTACGACTACT
GGGGTCAGGGAACCCTGGTCACCGTCTCGAGC (SEQ ID NO: 870)
BMS3h-38-225
GAGGTGCAGCTGTTGGCGTCTGGGGGAGGCTTGGTGCAGCCTGGGGGGTCCCTGCGTCTCTCCTGCGCAGCCTCCGGAT
TCACCTTTGAGGAGGAGGAGATGATTTGGGTCCGTCAGGCTCCAGGGAAGGGTCTAGAGTGGGTCTCAGCTATTAGTGG
TAGTGGTGGTGGCACATACTACGCAGACTCCGTGAAGGGCCGGTTCACCATCTCCCGCGACAATTCCAAGAACACGCTG
TATCTGCAAATGAACAGCCTGCGTGCCGAGGATACCGCGGTATATTACTGTGGGAAAGAGCCGTTTCGTTATGACTACT
GGGGTCAGGGAACCCTGGTCACCGTCTCGAGC (SEQ ID NO: 871)
BMS3h-38-226
GAGGTGCAGCTGTTGGCGTCTGGGGGAGGCTTGGTACAGCCTGGGGGGTCCCTGCGTCTCTCCTGCGCAGCCTCCGGAT
TCACCTTTGAGGAGGAGGAGATGATTTGGGTCCGTCAGGCTCCAGGGAAGGGTCTAGAGTGGGTCTCAGCTATTAGTGG
TAGTGGTGGTAGCACATACTACGCAGACTCCGTGAAGGGCCGGTTCACCATCTCCCGCGACAATTCCAAGAACACGCTG
TATCTGCAAATGAACAGCCTGCGTGCCGAGGATACCGCGGTATATTACTGTGGGAAAGAGCCGTTGTACTATGACTACT
GGGGTCAGGGAACCCTGGTCACCGTCTCGAGC (SEQ ID NO: 872)
BMS3h-38-227
GAGGTGCAGCTGTTGGCGTCTGGGGGAGGCTTGGTACAGCCTGGGGGGTCCCTGCGTCTCTCCTGCGCAGCCTCCGGAT
TCACCTTTGAGGAGGAGGAGATGATTTGGGTCCGTCAGGCTCCAGGGAAGGGTCTAGAGTGGGTCTCAGCTATTAGTGG
TAGTGGTGGTAGCACATACTACGCAGACTCCGTGAAGGGCCGGTTCACCATCTCCCGCGACAATTCCAAGAACACGCTG
TATCTGCAAATGAACAGCCTGCGTGCCGAGGATACCGCGGTATATTACTGTGGGAAAGAGCCCATGTACTATGACTACT
GGGGTCAGGGAACCCTGGTCACCGTCTCGAGC (SEQ ID NO: 873)
BMS3h-38-228
GAGGTGCAGCTGTTGGCGTCTGGGGGAGGCTTGGTACAGCCTGGGGGGTCCCTGCGTCTCTCCTGCGCAGCCTCCGGAT
TCACCTTTGAGGAGGAGGAGATGATTTGGGTCCGCCAGGCTCCAGGGAAGGGTCTAGAGTGGGTCTCAGCTATTAGTAG
GAACGGTTTCAGCACATACTACGCAGACTCCGTGAAGGGCCGGTTCACCATCTCCCGCGACAATTCCAAGAACACGCTG
TATCTGCAAATGAACAGCCTGCGTGCCGAGGATACCGCGGTATATTACTGTGGGAAAGAGCCGTTTCGTTATGACTACT
GGGGTCAGGGAACCCTGGTCACCGTCTCGAGC (SEQ ID NO: 874)
BMS3h-38-229
GAGGTGCAGCTGTTGGCGTCTGGGGGAGGCTTGGTACAGCCTGGGGGGTCCCTGCGTCTCTCCTGCGCAGCCTCCGGAT
TCACCTTTGAGGAGGAGGAGATGATTTGGGTCCGCCAGGCTCCAGGGAAGGGTCTAGAGTGGGTCTCAGCTATTAGTCG
CACGGGTGGGAGCACATACTACGCAGACTCCGTGAAGGGCCGGTTCACCATCTCCCGCGACAATTCCAAGAACACGCTG
TATCTGCAAATGAACAGCCTGCGTGCCGAGGATACCGCGGTATATTACTGTGGGAAAGAGCCGTTTCGTTATGACTACT
GGGGTCAGGGAACCCTGGTCACCGTCTCGAGC (SEQ ID NO: 875)
BMS3h-38-230
GAGGTGCAGCTGTTGGCGTCTGGGGGAGGCTTGGTACAGCCTGGGGGGTCCCTGCGTCTCTCCTGCGCAGCCTCCGGAT
TCACCTTTGAGGAGGAGGAGATGATTTGGGTCCGCCAGGCTCCAGGGAAGGGTCTAGAGTGGGTCTCAGCTATTAGTCG
GGAGGGTGGGAGCACATACTACGCAGACTCCGTGAAGGGCCGGTTCACCATCTCCCGCGACAATTCCAAGAACACGCTG
TATCTGCAAATGAACAGCCTGCGTGCCGAGGATACCGCGGTATATTACTGTGGGAAAGAGCCGTTTCGTTATGACTACT
GGGGTCAGGGAACCCTGGTCACCGTCTCGAGC (SEQ ID NO: 876)
BMS3h-38-231
GAGGTGCAGCTGTTGGCGTCTGGGGGAGGCTTGGTACAGCCTGGGGGGTCCCTGCGTCTCTCCTGCGCAGCCTCCGGGT
TCCCCTTTGAGGAGGAGGAGATGATTTGGGTCCGCCAGGCTCCAGGGAAGGGTCTAGAGTGGGTCTCAGCTATTAGTCG
GCAGGGTTGGAGCACATACTACGCAGACTCCGTGAAGGGCCGGTTCACCATCTCCCGCGACAATTCCAAGAACACGCTG
TATCTGCAAATGAACAGCCTGCGTGCCGAGGATACCGCGGTATATTACTGTGGGAAAGAGCCGTTTCGTTATGACTACT
GGGGTCAGGGAACCCTGGTCACCGTCTCGAGC (SEQ ID NO: 877)
BMS3h-38-232
GAGGTGCAGCTGTTGGCGTCTGGGGGAGGCTTGGTACAGCCTGGGGGGTCCCTGCGTCTCTCCTGCGCAGCCTCCGGAT
TCACCTTTGAGGAGGAGGAGATGATTTGGGTCCGCCAGGCTCCAGGGAAGGGTCTAGAGTGGGTCTCAGCTATTAGTAG
GGGCGGTGGGAGCACATACTACGCAGACTCCGTGAAGGGCCGGTTCACCATCTCCCGCGACAATTCCAAGAACACGCTG
TATCTGCAAATGAACAGCCTGCGTGCCGAGGATACCGCGGTATATTACTGTGGGAAAGAGCCGTTTCGTTATGACTACT
GGGGTCAGGGAACCCTGGTCACCGTCTCGAGC (SEQ ID NO: 878)
BMS3h-38-233
GAGGTGCAGCTGTTGGCGTCTGGGGGAGGCTTGGTACAGCCTGGGGGGTCCCTGCGTCTCTCCTGCGCAGCCTCCGGAT
TCACCTTTGAGGAGGAGGAGATGATTTGGGTCCGCCAGGCTCCAGGGAAGGGTCTAGAGTGGGTCTCAGCTATTAGTCG
CACGGGTTACAGCACATACTACGCAGACTCCGTGAAGGGCCGGTTCACCATCTCCCGCGACAATTCCAAGAACACGCTG
TATCTGCAAATGAACAGCCTGCGTGCCGAGGATACCGCGGTATATTACTGTGGGAAAGAGCCGTTTCGTTATGACTACT
GGGGTCAGGGAACCCTGGTCACCGTCTCGAGC (SEQ ID NO: 879)
BMS3h-38-234
GAGGTGCAGCTGTTGGCGTCTGGGGGAGGCTTGGTACAGCCTGGGGGGTCCCTGCGTCTCTCCTGCGCAGCCTCCGGAT
TCACCTTTGAGGAGGAGGAGATGATTTGGGTCCGCCAGGCTCCAGGGAAGGGTCTAGAGTGGGTCTCAGCTATTAGTAG
GAACGGTAGGAGCACATACTACGCAGACTCCGTGAAGGGCCGGTTCACCATCTCCCGCGACAATTCCAAGAACACGCTG
TATCTGCAAATGAACAGCCTGCGTGCCGAGGATACCGCGGTATATTACTGTGGGAAAGAGCCGTTTCGTTATGACTACT
GGGGTCAGGGAACCCTGGTCACCGTCTCGAGC (SEQ ID NO: 880)
BMS3h-38-235
GAGGTGCAGCTGTTGGCGTCTGGGGGAGGCTTGGTACAGCCTGGGGGGTCCCTGCGTCTCTCCTGCGCAGCCTCCGGAT
TCACCTTTGAGGAGGAGGAGATGATTTGGGTCCGCCAGGCTCCAGGGAAGGGTCTAGAGTGGGTCTCAGCTATTAGTAG
GAACGGTTACAGCACATACTACGCAGACTCCGTGAAGGGCCGGTTCACCATCTCCCGCGACAATTCCAAGAACACGCTG
TATCTGCAAATGAACAGCCTGCGTGCCGAGGATACCGCGGTATATTACTGTGGGAAAGAGCCGTTTCGTTATGACTACT
GGGGTCAGGGAACCCTGGTCACCGTCTCGAGC (SEQ ID NO: 881)
BMS3h-38-236
GAGGTGCAGCTGTTGGCGTCTGGGGGAGGCTTGGTACAGCCTGGGGGGTCCCTGCGTCTCTCCTGCGCAGCCTCCGGAT
TCACCTTTGAGGAGGAGGAGATGATTTGGGTCCGCCAGGCTCCAGGGAAGGGTCTAGAGTGGGTCTCAGCTATTAGTAG
GAAGGGTAGCAGCACATACTACGCAGACTCCGTGAAGGGCCGGTTCACCATCTCCCGCGACAATTCCAAGAACACGCTG
TATCTGCAAATGAACAGCCTGCGTGCCGAGGATACCGCGGTATATTACTGTGGGAAAGAGCCGTTTCGTTATGACTACT
GGGGTCAGGGAACCCTGGTCACCGTCTCGAGC (SEQ ID NO: 882)
BMS3h-38-237
GAGGTGCAGCTGTTGGCGTCTGGGGGAGGCTTGGTACAGCCTGGGGGGTCCCTGCGTCTCTCCTGCGCAGCCTCCGGAT
TCACCTTTGAGGAGGAGGAGATGATTTGGGTCCGCCAGGCTCCAGGGAAGGGTCTAGAGTGGGTCTCAGCTATTAGTCG
GGGCGGTTGGAGCACATACTACGCAGACTCCGTGAAGGGCCGGTTCACCATCTCCCGCGACAATTCCAAGAACACGCTG
TATCTGCAAATGAACAGCCTGCGTGCCGAGGATACCGCGGTATATTACTGTGGGAAAGAGCCGTTTCGTTATGACTACT
GGGGTCAGGGAACCCTGGTCACCGTCTCGAGC (SEQ ID NO: 883)
BMS3h-38-238
GAGGTGCAGCTGTTGGCGTCTGGGGGAGGCTTGGTACAGCCTGGGGGGTCCCTGCGTCTCTCCTGCGCAGCCTCCGGAT
TCACCTTTGAGGAGGAGGAGATGATTTGGGTCCGCCAGGCTCCAGGGAAGGGTCTAGAGTGGGTCTCAGCTATTAGTCG
CTCGGGTTACAGCACATACTACGCAGACTCCGTGAAGGGCCGGTTCACCATCTCCCGCGACAATTCCAAGAACACGCTG
TATCTGCAAATGAACAGCCTGCGTGCCGAGGATACCGCGGTATATTACTGTGGGAAAGAGCCGTTTCGTTATGACTACT
GGGGTCAGGGAACCCTGGTCACCGTCTCGAGC (SEQ ID NO: 884)
BMS3h-38-239
GAGGTGCAGCTGTTGGCGTCTGGGGGAGGCTTGGTACAGCCTGGGGGGTCCCTGCGTCTCTCCTGCGCAGCCTCCGGAT
TCACCTTTGAGGAGGAGGAGATGATTTGGGTCCGCCAGGCTCCAGGGAAGGGTCTAGAGTGGGTCTCAGCTATTAGTAG
GAACGGTATGAGCACATACTACGCAGACTCCGTGAAGGGCCGGTTCACCATCTCCCGCGACAATTCCAAGAACACGCTG
TATCTGCAAATGAACAGCCTGCGTGCCGAGGATACCGCGGTATATTACTGTGGGAAAGAGCCGTTTCGTTATGACTACT
GGGGTCAGGGAACCCTGGTCACCGTCTCGAGC (SEQ ID NO: 885)
BMS3h-38-240
GAGGTGCAGCTGTTGGAGTCTGGGGGAGGCTTGGTACAGCCTGGGGGGTCCCTGCGTCTCTCCTGCGCAGCCTCCGGAT
TCACCTTTGAGGAGGAGGAGATGATTTGGGTCCGCCAGGCTCCAGGGAAGGGTCTAGAGTGGGTCTCAGCTATTAGTAG
GAACGGTTACAGCACATACTACGCAGACTCCGTGAAGGGCCGGTTCACCATCTCCCGCGACAATTCCAAGAACACGCTG
TATCTGCAAATGAACAGCCTGCGTGCCGAGGATACCGCGGTATATTACTGTGGGAAAGAGCCGTTTCGTTATGACTACT
GGGGTCAGGGAACCCTGGTCACCGTCTCGAGC (SEQ ID NO: 886)
BMS3h-41-1
GAGGTGCAGCTGTTGGAGTCTGGGGAAGGCTTGGTACAGCCTGGGGGGTCCCTGCGTCTCTCCTGTGCAGCCTCCGGAT
TCACCTTTACTGAGCATGAGATGATTTGGGTCCGCCAGGCTCCAGGGAAGGGTCTGGAGTGGGTCTCATCTATTTCGGG
TAATGGTGCTAATACATACTACGCAGACTCCGTGAAGGGCCGGTTCACCATCTCCCGCGACAATTCCAAGAACACGCTG
TATCTGCAAATGAACAGCCTGCGTCCCGAGGACACCGCGGTATATTACTGTGCGAAAGAGCCGCTTAGGTTTGACTACT
GGGGCCAGGGAACCCTGGTCACCGTCTCGAGC (SEQ ID NO: 887)
BMS3h-41-2
GAGGTGCAGCTGTTGGAGTCTGGGGGAGGCTTGGTACAGCCTGGGGGGTCCCTGCGTCTCTCCTGTGCAGCCTCCGGAT
CCACCTTTACTGAGTATGAGATGATTTGGGTCCGCCAGGCTCCAGGGAAGGGTCTGGAGTGGATCTCATCTATTTCGGG
TAATGGTGCTAATACATACTACGCAGACTCCGTGAAGGGCCGGTTCACCATCTCCCGCGACAATTCCAAGAACACGCTG
TATCTGCAAATGAACAGCCTGCGTGCCGAGGACACCGCGGTATATTTCTGTGCGAAAGAGCCGCTTAGGTTTGACTACA
GGGGTCAGGGAACCCTGGTCACCGTCTCGAGC (SEQ ID NO: 888)
BMS3h-41-3
GAGGTGCAGCTGTTGGAGCCTGGGGGAGGCTTGGTACAGCCTGGGGGGTCCCTGCGTCTCTCCTGTGCAGCCTCCGGAT
TCACCTTTACTGAGTATGAGATGATTTGGGTCCGCAAGGCTCCAGGGAAGGGTATGGAGTGGGTCTCATCTATTTCGGG
TAATGGTGCTAATACATACTACGCAGACTCCGTGAAGGGCCGGTTCACCATCTCCCGCGACAATTCCAAGAACATGCTG
TATCTGCAAATGAACAGCCTGCGTGCCGAGGACACCGCGGTATATTACTGTGCGAAAGAGCCGCTTAGGTTTGGCTACT
GGGGTCAGGGTACCCTGGTCACCGTCTCGAGC (SEQ ID NO: 889)
BMS3h-41-4
GAGGTGCAGCTGTTGGATTCTGGGGGAGGCTTGGTACAGCCTGGGGGGTCACTGCGTCTCTCCTGTGCAGCCTCCGGAT
TCACCTTTACTGAGTATGAGATGATTTGGGTCCGCCAGGCTCCAGGGAAGGGTCTGGAGTGGGTCTCATCTATTTCGGG
TAATGGTGCTAATACATACTACGCAGACTCCGTGAAGGGCCGGTTCACCATCTCCCGCGACAATTCCAAGAACACGCTG
TATCTACAAATGAACAGCCTGCGTGCCGAGGACACCGCGGTATATTACTGTGCGAAAGAGCCGCTTAGGTTTGACTACT
GGGGTCGGGGAACCCTGGTCACCGTCTCGAGC (SEQ ID NO: 890)
BMS3h-41-5
GAGGTGCAGCTGTTGGGGTCAGGGGGAGGCTTGGTACAGCCTGGGGGGTCCCTGCGTCTCTCCTGTGCAGCCTCCGGAT
TCACCTTTACTGAGTATGAGATGATTTGGGTCCGCCAGGCTCCAGGGAAGAGTCTGGAGTGGGTCTCATCTATTTCGGG
TAATGGTGCTAATACATACTACGCAGACTCCGTGAAGGGCCGGTTCACCATCTCCCGCGACAATTCCAAGAACACGCTG
TATCTGCAAATGAACAGCCTGCGTGCCGAGGACACCGCGGTATATTACTGTGCGAAAGAGCCGCTTAGGTATGACGACT
GGGGTCAGGGAACCCTGGTCACCGTCTCGAGC (SEQ ID NO: 891)
BMS3h-41-6
GAGGTGCAGCCGTTGGAGTCTGGGGGAGGCTTGGTACAGCCTGGGGGGTCCCTGCGTCTCTCCTGTTCAGCCTCCGGAT
TCACCTTTAATGAGTATGAGATGATTTGGGTCCGCCAGGCTCCAGGGAAGGGTCTGGAGTGGGTCTCATCTATTTCGGG
TAATGGTGCTAATACATACTACGCAGACTCCGTGAAGGGCCGGTTCACCATCTCCCGCGACAATTCCAAGAACACGCTG
TATCTGCAAATGAACAGCCTGCGTGCCGAGGACACCGCGGTATATTACTGTGCGAAAGAGCCGCTTAGGTTTGACTACT
GGGGTCAGGGAACCCTGGTCACCGTCTCGAGC (SEQ ID NO: 892)
BMS3h-41-7
GAGGTGCAGCTGTTGGAGTCTGGGGAAGGCTTGGTACAGCCTGGGGGGTCCCTGCGTCTCTCCTGTGCAGCCTCCGGAT
TCACCTTTGCTGAGTATGAGATGATTTGGGTCCGCCAGGCTCCAGGGAAAGGTCTGGAGTGGGTCTCATCTATTTCGGG
TAATGGTGCTAATACATACTACGCAGACTCCGTGAAGGGCCGGTTCACCATCTCCCGCGACAATTCCAAGAACACGCTG
TATCTGCAAATGAACAGCCTGCGTGCCGAGGACACCGCGGTATATTACTGTGCGAAAGAGCCGCTTAGGTTTGACTACT
GGGGTCAGGGAACCCTGGTCACCGTCTCGAGC (SEQ ID NO: 893)
BMS3h-41-8
GAGGTGCAGCTGTTGGACCCTGGGGGAGGCTTGGTACAGCCTGGGGGGTCCCTGCGTCTCTCCTGTGCAGCCTCCGGAT
TCACCTTTACTGAGTCTGAGATGATTTGGGTCCGCCAGGCTCCAGGGAAGGGTCTGGAGTGGGTCTCATCTATTTCGGG
AAATGGTGCTAATACATACTACGCGGACTCCGTGAAGGGCCGGTTCACCATCTCCCGCGACAATTCCAAGAACACGCTG
TATCTGCAAATGAACAGCCTGCGTGCCGAGGACACCGCGGTATATTACTGTGCGAAAGAGCCGCTTAGGTTTGACTACT
GGGGTCAGGGAACCCTGGTCACCGTCTCGAGC (SEQ ID NO: 894)
BMS3h-41-9
GAGGTGCAGCTGTTGGAGCCTGGGGGAGGCTTGGTACAGCCTGGGGGGTCCCTGCGTCTCTCCTGTGCAGCCTCCGGAT
TCACCTTTACTGAGTATGAGATGATTTGGGTCCGCAAGGCTCCAGGGAAGGGTATGGAGTGGGTCTCATCTATTTCGGG
TAATGGTGCTAATACATACTACGCAGACTCCGTGAAGGGCCGGTTCACCATCTCCCGCGACAATTCCAAGAACACGCTG
TATCTGCAAATGAACAGCCTGCGTCCCGAGGACACCGCGGTATATTACTGTGCGAAAGAGCCGCTTAGGTTTGACGACT
GGGGTCAGGGAACCCTGGTCACCGTCTCGAGC (SEQ ID NO: 895)
BMS3h-41-10
GAGGTGCAGCTGTTGGAGTCTGGGGTAGGCTTGGTACAGCCTGGGGGGTCCCTGCGTCTCTCCTGTGCAGCCTCCGGAT
TCACCTTTACTGAGTATGAGATGATTTGGGTCCGCAAGGCCCCAGGGAAGGGTCTGGAGTGGGTCTCATCTATTTCGGG
TAATGGTGCTAATACATACTACGCAGACTCCGTGAAGGGCCGGTTCACCATCTCCCGCGACAATTCCAAGAACACGCTG
TATCTGCAAATGAACAGCCTGCGTGCCGAGGACACCGCGGTATATTACTGTGCGAAAGAACCGCTTAGGTTTGACAACT
GGGGTCAGGGAACCCTGGTCACCGTCTCGAGC (SEQ ID NO: 896)
BMS3h-41-11
GAGGTGCAGTTGTTGGAGTCTCGGGGAGGCTTGGTACAGCCTGGGGGGTCCCTGCGTCTCTCCTGTGCAGCCTCCGGAT
TCACCTTTACTGAGCATGAGATGATTTGGGTCCGCCAGGCTCCAGGGAAGGGTCTGGAGTGGGTCTCATCTATTTCGGG
TAATGGTGCTAATACATACTACGCAGACTCCGTGAAGGGCCGGTTCTCCGTCTCCCGCGACAATTCCAAGAACACGCTG
TATCTGCAAATGAACAGCCTGCGTGCCGAGGACACCGCGGTATATTACTGTGCGAAAGAGCCGCTTAGGTTTGACTACT
GGGGTCAGGGAACCCTGGTCACCGTCTCGAGC (SEQ ID NO: 897)
BMS3h-41-12
GAGGTGCAGCCGTTGGAGTCTGGGGGAGGCTTGGTACAGCCTGGGGGGTCCCTGCGTCTCTCCTGTGCTGCCTCCGGAT
TCACCTTTACTGAGTATGAGATGATTTGGGTCCGCCAGGCTCCAGGGAAGGGTCTGGAGTGGGTCTCATCTATTTCGGG
TAATGGTGCTAATACATACTACGCAGACTCCGTGAAGGGCCGGTTCACCATCTCCCGCGACAATTCCAAGAACACGCTG
TATCTGCAAATGAACAGCCTGCGTGCCGAGGACACCGCGGTATATTACTGTGCGAAAGAGCCGCTTAGGTTTGACTACT
GGGGTCAGGGAACCCTGGTCACCGTCTCGAGC (SEQ ID NO: 898)
BMS3h-41-13
GAGGTGCAGCTGTTGGAGTCTGCGGGAGGCTTGGTACAGCCTGGGGGGTCCCTGCGTCTCTCCTGTGCAGCCTCCGGAT
TCACCTTTGCTGAGTATGAGATGATTTGGGTCCGCCAGGCTCCAGGGAAGGGTCTGGAGTGGGTCTCATCAATTTCGGG
TAATGGTGCTAATACATACTACGCAGACTCCGTGAAGGGCCGGTTCACCATCTCCCGCGACAATTCCAAGAACACGCTG
TATCTGCAAATGAACAGCCTGCGTGCCGAGGACACCGCGGTATATTACTGTGCGAAAGAGCCGCTTAGGTTTGACTACT
GGGGTCAGGGAGCCCTGGTCACCGTCTCGAGC (SEQ ID NO: 899)
BMS3h-41-14
GAGGtGCAGCtGTTGGAGCCTGGGGGAGGCTTGGTACAGCCTGGGGGGTCGCTGCGTCTCTCCTGTGCAGCCTCCGGAT
TCACCTTTACTGAGTATGAGATGATTTGGGTCCGCCAGGCTCCAGGGAAGGGTCTGGAGTGGGTCTCATCTATTTCGGG
TAATGGTGCTAATACATACTACGCAGACTCCGTGAAGGGCCGGTTCACCATCTCCCGCGACAATTCCAAGAACACGCTG
TATCTGCAAATGAACAGCCTGCGTGCCGAGGACACCGCGGTATATTACTGTGCGAAAGAGCCGCTTAGGTTTGACAACT
GGGGTCAGGGAACCCTGGTCACCGTCTCGAGC (SEQ ID NO: 900)
BMS3h-43-1
GAGGTGCAGCTGTTGGAGTCTGGGGGAGGCTTGGTACAGCCTGGGGGGTCTCTGCGTCTCTCCTGTACAGCCTCCGGAT
TCACCTTTAATATGTATGAGATGTCGTGGGTCCGCCAGGCTCCAGGGAAGGGTCTAGAGTGGGTCTCAGGTATTAGTAG
ACGTGGTTTTACTACATACTACGCAGACTCCGTGAAGGGCCGGTTCACCATCTCCCGCGACAATTCCAAGAACACGCTG
TATCTGCAAATGAACAGCCTGCGTGCCGAGGATACCGCGGTATATTACTGTGCGAAAGAGCCGATTACGTATGATTTGA
GGTATGCGCGTTTTGACTACTCGGGTCAGGGAACCCTGGTCACCGTCTCGAGC (SEQ ID NO: 901)
BMS3h-43-2
GAGGAGCAGCTGTTGGAGTCTGGGGGAGGCTTGGTACAGCCTGGGGGGTCCCTGCGTCTCTCCTGTACAGCCTCCGGAT
TCACCTTTAATATGTATGAGATGTCGTGGGTCCGCCAGGCTCCAGGGAAGGGTCTAGAGTGGGTCTCAGGTATTAGTAG
ACGTGGTTTTACTACATACTACGCAGACTCCGTGAAGGGCCGGTTCACCATCTCCCGCGACAATTCCAAGAACACGCTG
TATCTGCAAATGAACAGCCTGCGTGCCGAGGATACCGCGGTATATTACTGTGCGAAAGAGCCGATTACGTATGCTACGA
GGTATGCGCGTTTTGACTACTGGGGTCAGGGAACCCTGGTCACCGTCTCGAGC (SEQ ID NO: 902)
BMS3h-43-3
GAGGTGCAGCTGTTGGAGTCTGGGGGAGGCTTGGTACAGCCTGGGGGGTCCCTGCGTCTCTCCTGTACAGCCTCCGGAT
TCACCTTTAATATGTATGAGATGTCGTGGGTCCGCCAGGCTCCAGGGAAGGGTCTAGAGTGGGTCTCAGGTATTAGTAG
GCGTGGTTTTACTACATACTACGCAGACTCCGTGAAGGGCCGGTTCACCATCTCCCGCGACAATTTCAAGAACACGCTG
TATCTGCAAATGAACAGCCTGCGTGCCGAGGATACCGCGGTATATTACTGTGCGAAAGAGCCGATTACGTATGATATGA
GGTATGCGCGTTTTGACTACGGGGGTCAGGGAACCCTGGTCACCGTCTCGAGC (SEQ ID NO: 903)
BMS3h-43-4
GAGGTGCAGCTGTTGGAGTCTGGGGGAGGCTTGGTACAGCCTGGGGGGTCCCTGCGTCTCTCCTGTACAGCCTCCGGAT
TCACCTTTAATATGTATGAGATGTCGTGGGTCCGCCAGGCTCCAGGGAAGGGTCTAGAGTGGGTCTCAGGTATTAGTAG
GCGTGGTTTTACTACATACTACGCAGACTCCGTGAAGGGCCGGTTCACCATCTCCCGCGACAATTCCAAGAACACGCTG
TATCTGCAAATGAACAGCCTGCGTGCCGAGGATACCGCGGTATATTACTGTGCGAAAGAGCCGATTACGTATGATATGA
GGTATGCGCGTTTTGACAACTGGGGTCAGGGAACCCTGGTCACCGTCTCGAAC (SEQ ID NO: 904)
BMS3h-43-5
GAGGTGCAGCTGTTGGAGTCTGGGGGAGGCTTGGTACAGCCTGGGGGGTCCCTGCGTCTCTCCTGTACAGCCTCCGGAT
TCACCTTTAATACGTATGAGATGTCGTGGGTCCGCCAGGCTCCAGGGAAGGGTCTAGAGTGGGTCTCAGGTATTGGTAG
GCGTGGTTTTACTACATACTACGCAGACTCCGTGAAGGGCCGGTTCACCATCTCCCGCGACAATTCCAAGAACACGCTG
TATCTGCAAATGAACAGCCTGCGTGCCGAGGATACCGCGGTATATTACTGTGCGAAAGAGCCGATTACGTATGATTTGA
GGTATGCGCGTTTTGACTACTCGGGTCAGGGAACCCTGGTCACCGTCTCGAGC (SEQ ID NO: 905)
BMS3h-43-6
GAGGTGCAGCTGATGGAGTCAGGGGGAGGCTTGGTACAGCCTGGGGGGTCCCTGCGTCTCTCCTGTACAGCCTCCGGAT
TCTCCTTTAATATGTATGAGATGTCGTGGGTCCGCCAGGCTCCAGGGAAAGGTCTAGAGTGGGTCTCAGGTATTAGTAG
GCGTGGTTATACTACATACTACGCAGACTCCGTGAAGGGCCGGTTCACCATCTCCCGCGACAATTCCAAGAACACGCTG
TATCTGCAAATGAACAGCCTGCGTGCCGAGGATACCGCGGTATATTACTGTGCGAAAGAGCCGATTACGTATGATATGA
GGTATGCGCGTTTTGACTACTGGGGTCGGGGAACCCTGGTCACCGTCTCGAGC (SEQ ID NO: 906)
BMS3h-43-7
GAGGTGCAGCTGTTGGAGTCTGGGGGAGGCTTGGTGCAGCCTGGGGGGTCCCTGCGTCTCTCCTGTACAGCCTCCGGAT
TCGCCTTTAATATGTATGAGATGTCGTGGGTCCGCCAGGCTCCAGGGAAGGGACTAGAGTGGGTCTCAGGTATTAGTAG
GCATGGTTTTACTACGTACTACGCAGACTCCGTGAAGGGCCGGTTCACCGTCTCCCGCGACAATTCCAAGAACACGCTG
TATCTGCAAATGAACAGCCTGCGTGCCGAGGATACCGCGGTATATTACTGTGCGAAAGAGCCGATTACGTATGATATGC
GGTATGCGCGTTCTGACTACTGGGGTCAGGGAACCCTGGTCACCGTCTCGAGC (SEQ ID NO: 907)
BMS3h-43-8
GAGGTGCAGCTGTTGGAGTCTGGGGGAGGCTTGGTACAGCCTGGGGGGTCCCTGCGTCTCTCCTGTACAGCCTCCGGAT
TCACCTTTAATATGTATGAGATGTCGTGGGTCCGCCAGGCTCCAGGGAAGGGTCTAGAGTGGGTCTCAGGTATTAGTAG
GCGTGGTTTTACTACATACTACGCAGACTCCGTGAAGGGCCGGTTCACCATCTCCCGCGACAATTCCAAGAACACGCTG
TATCTGCAAATGAACAGCCTGCGTGCCGAGGATACCGCGGTATATTTCTGTGCGAAAGAGCCGATTACGTATGATATGA
GGTATGCGCGTTCTGACTACTGGGGTCAGGGAACCCTGGTCACCGTCTCGAGC (SEQ ID NO: 908)
BMS3h-43-9
GAGGTGCAGCTGTTGGAGTCTGGGGGGGGCTTGGTTCAGCCTGGGGGGTCCCTGCGTCTCTCCTGTACAGCCTCCGGGT
TCACCTTTAATATGTATGAGATGTCGTGGGTCCGCCAGGCTCCAGGGAAGGGTCTAGAGTGGGTCTCAGGTATTAGTAG
GCGTGGTTTTACTACATACTACGCAGACTCCGTGAAGGGCCGGTTCACCATCTCCCGCGACAATTCCAAGAACACGCTG
TATCTGCAAATGAACAGCCTGCGTGCCGAGGATACCGCGGTATATTACTGTGCGAAAGAGCCGATTACGTATTCTATGA
GGTATGCGCGTTTTGACTACTCGGGTCTGGGAACCATGGTCACCGTCTCGAGC (SEQ ID NO: 909)
BMS3h-43-10
GAGGTGCAGCTGCTGGAGTCTGGGGGAGGCTTGGTACAGCCTGGGGGGTCCCTTCGTCTCTCCTGTACAGCCTCCGGAT
TCACCTTTAATATGTATGAGATGTCGTGGGTCCGCCAGGCTCCAGGGAAGGGTCTAGAGTGGGTCTCAGGTATTAGTAG
GCGTGGTTTTACTACATACTACGCAGACTCCGTGAAGGGCCGGTTCACCATCTCCCGCGACAATTCCAAGAACACGCTG
TATCTGCAAATGAACAGCCTGCGTGCCGAGGATACCGCGGTATATTACTGTGCGAAAGAGCCGATTACGTATGATATGA
GGTATGCGCGTTTTGACTACAGTGGTCAGGGAACCCTGGTCACCGTCTCGAGC (SEQ ID NO: 910)
BMS3h-43-11
GAGGTGCAGCTGTTGGAGTCTGGAGGAGGCTTGGTACAGCCTGGGGGGTCCCTGCGTCTCTCCTGTACAGCCTCCGGAT
TCACCTTTAATATGTATGAGATGTCGTGGGTCCGCAAGGCTCCAGGGAAGGGTCTAGAGTGGGTCTCAGGTATTAGTAG
GCATGGTTTTACTACATACTACGCAGACTCCGTGAAGGGCCGGTTCACCATCTCCCGCGACAATTCCAAGAACACGCTG
TATCTGCAAATGAACAGCCTGCGTGCCGAGGATACCGCGGTATATTACTGTGCGAAAGAGCCGATTACGTATGATATGA
GGTATGCGCGTTTTGACTACTGGGGTCAGGGAACCCTGGTCACCGTCTCGAGC (SEQ ID NO: 911)
BMS3h-43-12
GAGGTGCAGCTGTTCGAGTCTGGGGGAGGCTTGGTACAGCCTGGGGGGTCCCTGCGTCTCTCCTGTACAGCCTCCGGAT
TCACCTTTAATATGTATGAGATGTCGTGGGTCCGCCAGGCTCCAGGGAAGGGTCTAGAGTGGGTCTCAGGTATTAGTAG
GCGTGGTTTTACTACATACTACGCAGACTCCGTGAAGGGCCGGTTCACCATCTCCCGCGACAATTCCAAGAACACGCTG
TATCTGCAAATGAACAGCCTGCGTGCCGAGGATACCGCGGTATATTACTGTGCGAAGGAGCCGATTACGTATGATATGA
GGTATGCGCGTTTTGACTACTGGGGTCGGGGAACCCTGGTCACCGTCTCGAGC (SEQ ID NO: 912)
BMS3h-43-13
GAGGTGCAGCTGTTGGAGTCTGGGGGAGGCTTGGTACAGCCTGGGGGATCCCTGCGTCTCTCCTGTACAGCCTCCGGTT
TCACCTTTAATATGTATGAGATGTCGTGGGTCCGCCAGGCTCCAGGGAAGGGTCTAGAGTGGGTCTCAGGTATTAGTAG
GCGTGGTTTTACTACATACTACGCAGACTCCGTGAAGGGCCGGTTCACCATCTCCCGCGACAATTCCAAGAACACGCTG
TATCTGCAAATGAACAGCCTGCGTGCCGAGGATACCGCGGTATATTACTGTGCGAAAGAGCCGATTACGTATGATATGA
GGTATGCGCGTTTTGACTACTGGGGTCGGGGAACCCTGGTCACCGTCTCGAGC (SEQ ID NO: 913)
BMS3h-43-14
GAGGTGCAGCTGTTGGAGTCTGGGGGAGGCTCGGTACAGCCTGGGGGGTCCCTGCGTCTCTCCTGTACAGCCTCCGGAT
TCTCCTTTAATATGTATGAGATGTCGTGGGTCCGCCAGGCTCCAGGGAAGGGTCTAGAGTGGGTCTCAGGTATTAGTAG
GCGTGGTTTTACTACATACTACGCAGACTCCGTGAAGGGCCGGTTCACCATCTCCCGCGACAATTCCAAGAACACGCTG
TATCTGCAAATGAACAGCCTGCGTGCCGAGGATACCGCGGTATATTACTGTGCGAAAGAGCCGATTACGTATGATATGA
GGTATGCGCGTTTTGACTACTGGGGTCAGGGAACCCTGGTCACCGTCTCGGGC (SEQ ID NO: 914)
BMS3h-43-15
GAGGTGCAGCTGTTGGAGTCTGGGGGAGGCTTGGTACAACCTGGGGGGTCCCTGCGTCTCTCCTGTACAGCCTCCGGAT
TCACCTTTAATATGTATGAGATGTCGTGGGTCCGCAAGGCTCCAGGGAAGGGTCTAGAGTGGGTCTCAGGTATTAGTAG
GCGTGGTTTTACTACATACTACGCAGACTCCGTGAAGGGCCGGTTCACCATCTCCCGTGACAATTCCAAGAACACGCTG
TATCTGCAAATGAACAGCCTGCGTGCCGAGGATACCGCGGTATATTACTGTGCGAAAGAGCCGATTACGTATGATATGA
GGTATGCGCGTTTTGACTACTGGGGTCAGGGAACCCTGGTCACCGTCTCGAGC (SEQ ID NO: 915)
BMS3h-56-1
GAGGTGCAGCTGTTGGAGTCTGGGGGAGGCTTGGTACAGCCTGGGGGGTCCCTGCGTCTCTCCTGTGCAGCCTCCGGAT
TCACCTTTCGGGATTATGAGATGTGGTGGGTCCGCCAGGCTCCAGGGAAGGGTCTAGAGCGGGTCTCAGCTATTAATCC
GCAGGGTACGCGTACATACTACGCAGACTCCGTGAAGGGCCGGTTCACCATCTCCCGCGACAATTCCAAGAACACGCTG
TATCTGCAAATGAACAGCCTGCGTGCCGAGGATACCGCGGTATATTACTGTGCGAAACTTCCGTTTACTTTTGAGGACT
GGGGTCAGGGAACCCTGGTCACCGTCTCGAGC (SEQ ID NO: 916)
BMS3h-56-2
GAGGTGCAGCTGTTGGAGTCTGGGGGAGGCTTGGTACAGCCTGGGGGGTCCCTGCGTCTCTCCTGTGCAGCCTCCGGAT
TCACCTTTCGGGATTATGAGATGTGGTGGGTCCGCCAGGCTCCAGGGAAGGGTCTAGAGCGGGTCTCAGCTATTAATCC
GCAGGGTACGCGTACATACTACGCAGACTCCGTGAAGGGCCGGTTCACCATCTCCCGCGACAATTCCAAGAACACGCTG
TATCTGCAAATGAACAGCCTGCGTGCCGAGGATACCGCGGTATATTACTGTGCGAAACTTCCGTTTACTTTTGACGACT
GGGGTCAGGGAACCCTGGTCACCGTCTCGAGC (SEQ ID NO: 917)
BMS3h-56-3
GAGGTGCAGCTGTTGGAGTCTGGGGGAGGCTTGGTACAGCCTGGGGGGTCCCTGCGTCTCTCCTGTGCAGCCTCCGGAT
TCACCTTTCGGGATTATGAGATGTGGTGGGTCCGCCAGGCTCCAGGGAAGGGTCTAGAGCGGGTCTCAGCTATTAATCC
GCAGGGTACGCGTACATACTACGCAGACTCCGTGAAGGGCCGGTTCACCATCTCCCGCGACAATTCCAAGAACACGCTG
TATCTGCAAATGAACAGCCTGCGTGCAGAGGATACCGCGGTATATTACTGTACGAAACTTCCGTTTATTTTTGAATACT
GGGGTCAGGGAACCCTGGTCACCGTCTCGAGC (SEQ ID NO: 918)
BMS3h-56-4
GAGGTGCAGCTGTTGGAGTCCGGGGGAGGCTTGGTACAGCCTGGGGGGTCCCTGCGTCTCTCCTGTGCAGCCTCCGGAT
TCACCTTTCGGGATTATGAGATGTGGTGGGTCCGCCAGGCTCCAGGGAAGGGTCTAGAGCGGGTCTCAGCTATTAATCC
GCAGGGTACGCGTACATACTACGCAGACTCCGTGAAGGGCCGGTTCACCATCTCCCGCGACAATTCCAAGAACACGCTG
TATCTGCAAATGAACAGCCTGCGTGCCGAGGATACCGCGGTATATTACTGTGCGAAACTTCCGTTTATGTTTGACGACC
GGGGTCAGGGAACCCTGGTCACCGTCTCGAGC (SEQ ID NO: 919)
BMS3h-56-5
GAGGTGCAGCTGTTGGAGTCTGGGGGAGGCTTGGTACAGCCTGGGGGGTCCCTGCGTCTCTCCTGTGCAGCCTCCGGAT
TCACCTTTCGGGATTATGAGATGTGGTGGGTCCGCCAGGCTCCAGGGAAGGGTCTAGAGCGGGTCTCAGCTATTAATCC
GCAGGGTACGCGTACATACTACGCAGACTCCGTGATGGGCCGGTTCACCATCTCCCGCGACAATTCCAAGAACACGCTG
TATCTGCAAATGAACAGCCTGCGTGCCGAGGATACCGCGGTATATTACTGTGCGAAACTTCCGTTTACTTTTGACGACT
GGGGTCAGGGAACCCTGGTCACCGTCTCGAGC (SEQ ID NO: 920)
BMS3h-56-6
GAGGTGCAGCTGTTGGAGTCTGGGGGAGGCTTGGTACAGCCTGGGGGGTCCCTGCGTCTCTCCTGTGCAGCCTCCGGAT
TCTCCTTTCGGGATTATGAGATGTGGTGGTACCGCCAGGCTCCAGGGAAGGGTCTAGAGCGGGTCTCAGCTATTAATCC
GCAGGGTACGCGTACATATTACGCAGACTCCGTGAAGGGCCGGTTCACCATCTCCCGCGACAATTCCAAGAACACGCTG
TATCTGCAAATGAACAGCCTGCGTGCCGAGGATACCGCGGTATATTACTGTGCGAAACTTCCGTTTATTTTTGACAACC
GGGGTCAGGGAACCCTGGTCACCGTCTCGAGC (SEQ ID NO: 921)
BMS3h-56-7
GAGGTGCAGCTGTTGGAGTCTGGGGGAGGCTTGGTACAGCCTGGGGGGTCCCTGCGTCTCTCCTGTGCAGCCTCCGGAT
TCACCTTTCGGGATTATGAGATGTGGTGGGTCCGCCAGGCTCCAGGGAAGGGTCTAGAGCGGGTCTCAGCTATTAATCC
GCAGGGTACGCGTACATACTACGCAGACTCCGTGAAGGGCCGGTTCACCATCTCCCGCGACAATTCCAAGAACACGCTG
TATCTGCAAATGAACAGCCTGCGTGCCGAGGATACCTCGGTATATCACTGTGCGAAACCTCCGTTTATTTTTGGCGACT
GGGGTCCGGGAACCCTGGTCACCGTCTCGAGC (SEQ ID NO: 922)
BMS3h-56-8
GAGGTGCAGCTGTTGGAGTCTGGGGGAGGCTTGGTACAGCCTGGGGGGTCCCGGCGTCTCTCCTGTGCAGCCTCCGGAT
TCACCTTTCGGGATTATGAGATGTGGTGGGTCCGCCAGGCTCCGGGGAAGGGTCTAGAGCGGGTCTCAGCTATTAATCC
GCAGGGTACGCGTACATACTACGCAGACTCCGTGAAGGGCCGGTTCACGATCTCCCGCGACAATTCCAAGAACACGCTG
TATCTGCAAATGAACAGCCTGCGTGCCGAGGATACCGCGGTATATTACTGTGCGAAACTTCCGTTTACTTTTGAGGACT
GGGGTCAGGGAACCCTGGTCACCGTCTCGAGC (SEQ ID NO: 923)
BMS3h-56-9
GAGGTGCAGCTGTTGGAGTCTGGGGGAGGCTTGGTACAGCCTGGGGGGTCCCTGCGTCTATCCTGTGCAGCCTCCGGAT
TCACCTTTCGGGATTATGAGATGTGGTGGGTCCGCCAGGCTCCAGGGAAGGGTCTAGAGCGGGTCTCAGCTATTAATCC
GCAGGGTACGCGTACATACTACGCAGACTCCGTGATGGGCCGGTTCACCATCTCCCGCGACAATTCCAAGAACACGCTG
TATCTGCAAATGAACAGCCTGCGTGCCGAGGATACTGCGGTATATTACTGTGCGAAACTTCCGTTTATGTTTGACGACC
GGGGTCAGGGAACCCTGGTCACCGTCTCGAGC (SEQ ID NO: 924)
BMS3h-56-10
GAGGTGCAGCTGTTGGAGTCTGGGGGAGGCTTGGTACAGCCTGGGGGGTCCCTGCGTCTCTCCTGTGCAGCCTCCGGAT
TCACCTTTCGGGATTATGAGATGTGGTGGGTCCGCCAGGCTCCAGGGAAGGTTCTAGAGCGGGTCTCAGCTATTAATCC
GCAGGGTACGCGTACATACTACGCAGACTCCGTGAAGGGCCGGTTCACCATCTCCCGCGACAATTCCAAGAACATGCTG
TATCTGCAAATGAACAGCCTGCGTGCCGAGGATACTGCGGTATATTACTGTGCGAAACTTCCGTTTATGTTTGACGACC
GGGGTCAGGGAACCCTGGTCACCGTCTCGAGC (SEQ ID NO: 925)
BMS3h-56-11
GAGGTGCAGCTGTTGGAGTCTGGGGGAGGCTTGGTACAGCCTGGGGGGTCCCTGCGTCTCTCCTGTGCAGCCTCCGGAT
TCACCTTTCGGGATTATGAGATGTGGTGGGTCCGCCAGGCTCCAGGGAAGGGTCTAGAGCGGGTCTCAGCTATTAATCC
GCAGGGTACGCGTACATACTACGCAGACTCCGTGAAGGGCCGGTTCACCATCTCCCGCGACAATTCCAAGAACACGCTG
TATCTGCAAATGAACAGCCTGCGAGCCGAGGATACTGCGGTATATTACTGTGCGAAACTTCCGTTTATGTTTGACGACC
GGGGTCAGGGAACCCTGGTCACCGTCTCGAGC (SEQ ID NO: 926)
BMS3h-56-12
GAGGTGCAGCTGTTGGAGTCTGGGGGAGGCTTGATACAGCCTGGGGGGTCCCTGCGTCTCTCCTGTGCAGCCTCCGGAT
TCACCTTTCGGGATTATGAGATGTGGTGGGTCCGCCAGGCTCCAGGGAAGGGTCTAGAGCGGGTCTCAGCTATTAATCC
GCAGGGTACGCGTACATACTACGCAGACTCCGTGAAGGGCCGGTTCACCATCTCCCGCGACAATTCCAAGAACACGCTG
TATCTGCAAATGAACAGCCTGCGTGCCGAGGATACCGCGGTATATTACTGTTTGAAACTTCCGTTTATTTTCGACTACT
GGGGTCAGGGAACCCTGGTCACCGTCTCGAGC (SEQ ID NO: 927)
BMS3h-56-13
GAGGTGCAGCTGTTGGAGTCTGGGGGAGGCTTGGTACAGCCTGGGGGGTCCCTGCGTCTATCCTGTGCAGCCTCCGGAT
TCACCTTTCGGGATTATGAGATGTGGTGGGTCCGCCAGGCTCCAGGGAAGGGTCTAGAGCGGGTCTCAGCTATTAACCC
GCAGGGTACGCGTACATACTATGCAGACTCCGTGAAGGGCCGGTTCACCATCTCCCGCGACAATTCCAAGAACACGCTG
TATCTGCAAATGAACAGCCTGCGTGCCGATGATACCGCGGTATATCACTGTACGAAACTTCCGTTTATTTTTGACTACT
GGGGTCAGGGAACCCTGGTCACCGTCTCGAGC (SEQ ID NO: 928)
BMS3h-56-14
GAGGTGCAGCTGTTGGAGTCTGGGGGAGGCTTGGTACAGCCTGGGGGGTCCCTGCGTCTCTCCTGTGCAGCCTCCGGAT
TCACCTTTCGGGATTATGAGATGTGGTGGGTCCGCCAGGCTCCAGGGATGGTTCTAGAGCGGGTCTCAGCTATTAATCC
GCAGGGTACGCGTACATACTACGCAGACTCCGTGAAGGGCCGGTTCACCATCTCCCGCGACAATTCCAAGAACACGCTA
TATCTGCAAATGAACAGCCTGCGTGCCGAGGATACCGCGGTATATTACTGTGCGAAACTTCCGTTTTTTTTTGACTCCA
GGGGTCAGGGAACCCTGGTCACCGTCTCGAGC (SEQ ID NO: 929)
BMS3h-56-15
GAGGTGCAGCTGTTGGAGTCTGGGGGAGGCTTGGTACAGCCTGGGGGGTCCCTGCGTCTCTCCTGTGCAGCCTCCGGAT
TCACCTTTCGGGATTATGAGATGTGGTGGGTCCGCCGGGCTCCAGGGAAGGGTCTAGAGCGGGTCTCAGCTATTAATCC
GCAGGGTACGCGTACATACTACGCAGACTCTGTGAAGGGCCGGTTCACCATCTCCCGCGACAATTCCAAGAACACGCTG
TATCTGCAAATGAACAGCCTGCGTGCCGAGGATACCGCGGTATATTACTGTGCGAAACTTCCGTTTACTTTTGAGGACT
GGGGTCAGGGAACCCTGGTCACCGTCTCGAGC (SEQ ID NO: 930)
BMS3h-56-16
GAGGTGCAGCTGTTGGAGTCTGGGGGAGGCTTGGTACAGCCTGGGGGGTCCCTGCGTCTCTCCTGTGCAGCCTCCGGAT
TCACCTTTCGGGATTATGAGATGTGGTGGGTCCGCCAGGCTCCAGGGAAGGGTCTAGAGCGGGTCTCAGCTATTAATCC
GCAGGGTACGCGTACATACTACGCAGACTCCGTGATGGGCCGGTTCACCATCTCCCGCGACAATTCCAAGAACACGCTG
TATCTGCAAATGAACAGCCTGCGTGCCGAGGACACCGCGGTATATTACTGTGCGAAACTTCCGTTTACTTTTGAGGACT
GGGGTCAGGGAACCCTGGTCACCGTCTCGAGC (SEQ ID NO: 931)
BMS3h-56-17
GAGGTGCAGCTGTTGGAGTCTGGGGGAGGCTTGGTACAGCCTGGGGGGTCCCTGCGTCTCTCCTGTGCAGCCTCCGGAT
TCTCCTTTCGGGATTATGAGATGTGGTGGTACCGCCAGGCTCCAGGGAAGGGTCTAGAGCGGGTCTCAGCTATTAATCC
GCAGGGTACGCGTACATATTACGCAGACTCCGTGAAGGGCCGGTTCACCATCTCCCGCGACAATTCCAAGAACACGCTG
TATCTGCAAATGAACAGCCTGCGTGCCGAGGACACCGCGGTATATTACTGTGCGAAACTTCCGTTTACTTTTGAGGACT
GGGGTCAGGGAACCCTGGTCACCGTCTCGAGC (SEQ ID NO: 932)
BMS3h-56-18
GAGGTGCAGCTGTTGGAGTCTGGGGGAGGCTTGGTACAGCCTGGGGGGTCCCTGCGTCTCTCCTGTGCAGCCTCCGGAT
TCACCTTTCGGGATTATGAGATGTGGTGGGTCCGCCAGGCTCCAGGGAAGGTTCTAGAGCGGGTCTCAGCTATTAATCC
GCAGGGTACGCGTACATACTACGCAGACTCCGTGAAGGGCCGGTTCACCATCTCCCGCGACAATTCCAAGAACATGCTG
TATCTGCAAATGAACAGCCTGCGTGCCGAGGACACCGCGGTATATTACTGTGCGAAACTTCCGTTTACTTTTGAGGACT
GGGGTCAGGGAACCCTGGTCACCGTCTCGAGC (SEQ ID NO: 933)
BMS3h-56-19
GAGGTGCAGCTGTTGGAGTCTGGGGGAGGCTTGGTACAGCCTGGGGGGTCCCTGCGTCTCTCCTGTGCAGCCTCCGGAT
TCACCTTTCGGGATTATGAGATGTGGTGGGTCCGCCAGGCTCCAGGGAAGGGTCTAGAGCGGGTCTCAGCTATTAATCC
GCAGGGTACGCGTACATACTACGCAGACTCCGTGAAGGGCCGGTTCACCATCTCCCGCGACAATTCCAAGAACACGCTG
TATCTGCAAATGAACAGCCTGCGTGCCGAGGATACCGCGGTATATCACTGTGCGAAACTTCCGTTTACTTTTGAGGACT
GGGGTCAGGGAACCCTGGTCACCGTCTCGAGC (SEQ ID NO: 934)
BMS3h-56-20
GAGGTGCAGCTGTTGGAGTCTGGGGGAGGCTTGGTACAGCCTGGGGGGTCCCTGCGTCTCTCCTGTGCAGCCTCCGGAT
TCACCTTTCGGGATTATGAGATGTGGTGGGTCCGCCAGGCTCCAGGGAAGGGTCTAGAGCGGGTCTCAGCTATTAATCC
GCAGGGTACGCGTACATACTACGCAGACTCCGTGAAGGGCCGGTTCACCATCTCCCGCGACAATTCCAAGAACACGCTG
TATCTGCAAATGAACAGCCTGCGTGCCGAGGATACCGCGGTATATTACTGTACGAAACTTCCGTTTACTTTTGAGGACT
GGGGTCAGGGAACCCTGGTCACCGTCTCGAGC (SEQ ID NO: 935)
BMS3h-56-21
GAGGTGCAGCTGTTGGAGTCTGGGGGAGGCTTGGTACAGCCTGGGGGGTCCCTGCGTCTCTCCTGTGCAGCCTCCGGAT
TCACCTTTCGGGATTATGAGATGTGGTGGGTCCGCCAGGCTCCAGGGAAGGGTCTAGAGCGGGTCTCAGCTATTAATCC
GCAGGGTACGCGTACATACTACGCAGACTCCGTGAAGGGCCGGTTCACCATCTCCCGCGACAATTCCAAGAACACGCTG
TATCTGCAAATGAACAGCCTGCGTGCCGAGGATACCGCGGTATATTACTGTTTGAAACTTCCGTTTACTTTTGAGGACT
GGGGTCAGGGAACCCTGGTCACCGTCTCGAGC (SEQ ID NO: 936)
BMS3h-56-22
GAGGTGCAGCTGTTGGAGTCTGGGGGAGGCTTGGTACAGCCTGGGGGGTCCCTGCGTCTATCCTGTGCAGCCTCCGGAT
TCACCTTTCGGGATTATGAGATGTGGTGGGTCCGCCAGGCTCCAGGGAAGGGTCTAGAGCGGGTCTCAGCTATTAACCC
GCAGGGTACGCGTACATACTATGCAGACTCCGTGAAGGGCCGGTTCACCATCTCCCGCGACAATTCCAAGAACACGCTG
TATCTGCAAATGAACAGCCTGCGTGCCGATGATACCGCGGTATATCACTGTACGAAACTTCCGTTTATTTTTGAATACT
GGGGTCAGGGAACCCTGGTCACCGTCTCGAGC (SEQ ID NO: 937)
BMS3h-56-23
GAGGTGCAGCTGTTGGAGTCTGGGGGAGGCTTGGTACAGCCTGGGGGGTCCCTGCGTCTCTCCTGTGCAGCCTCCGGAT
TCACCTTTCGGGATTATGAGATGTGGTGGGTCCGCCAGGCTCCAGGGAAGGGTCTAGAGCGGGTCTCAGCTATTAATCC
GCAGGGTACGCGTACATACTACGCAGACTCCGTGATGGGCCGGTTCACCATCTCCCGCGACAATTCCAAGAACACGCTG
TATCTGCAAATGAACAGCCTGCGTGCCGAGGACACCGCGGTATATTACTGTGCGAAAGAACCTTATAGTTTTGACTCCT
GGGGTCAGGGAACCCTGGTCACCGTCTCGAGC (SEQ ID NO: 938)
BMS3h-56-24
GAGGTGCAGCTGTTGGAGTCTGGGGGAGGCTTGGTACAGCCTGGGGGGTCCCTGCGTCTCTCCTGTGCAGCCTCCGGAT
TCACCTTTCGGGATTATGAGATGTGGTGGGTCCGCCAGGCTCCAGGGAAGGGTCTAGAGCGGGTCTCAGCTATTAATCC
GCAGGGTACGCGTACATACTACGCAGACTCCGTGATGGGCCGGTTCACCATCTCCCGCGACAATTCCAAGAACACGCTG
TATCTGCAAATGAACAGCCTGCGTGCCGAGGATACCGCGGTATATCACTGTGCGAAAGAACCTTATAGTTATGACTACT
GGGGTCAGGGAACCCTGGTCACCGTCTCGAGC (SEQ ID NO: 939)
BMS3h-56-25
GAGGTGCAGCTGTTGGAGTCTGGGGGAGGCTTGGTACAGCCTGGGGGGTCCCTGCGTCTCTCCTGTGCAGCCTCCGGAT
TCACCTTTCGGGATTATGAGATGTGGTGGGTCCGCCGGGCTCCAGGGAAGGGTCTAGAGCGGGTCTCAGCTATTAATCC
GCAGGGTACGCGTACATACTACGCAGACTCCGTGATGGGCCGGTTCACCATCTCCCGCGACAATTCCAAGAACACGCTG
TATCTGCAAATGAACAGCCTGCGTGCCGAGGATACCGCGGTATATTACTGTGCGAAACTTCCGTTTACTTTTGACGACT
GGGGTCAGGGAACCCTGGTCACCGTCTCGAGC (SEQ ID NO: 940)
BMS3h-56-26
GAGGTGCAGCTGTTGGAGTCTGGGGGAGGCTTGGTACAGCCTGGGGGGTCCCTGCGTCTATCCTGTGCAGCCTCCGGAT
TCACCTTTCGGGATTATGAGATGTGGTGGGTCCGCCGGGCTCCAGGGAAGGGTCTAGAGCGGGTCTCAGCTATTAATCC
GCAGGGTACGCGTACATACTACGCAGACTCCGTGATGGGCCGGTTCACCATCTCCCGCGACAATTCCAAGAACACGCTG
TATCTGCAAATGAACAGCCTGCGTGCCGAGGATACTGCGGTATATTACTGTGCGAAACTTCCGTTTATGTTTGACGACC
GGGGTCAGGGAACCCTGGTCACCGTCTCGAGC (SEQ ID NO: 941)
BMS3h-56-27
GAGGTGCAGCTGTTGGAGTCTGGGGGAGGCTTGGTACAGCCTGGGGGGTCCCTGCGTCTATCCTGTGCAGCCTCCGGAT
TCACCTTTCGGGATTATGAGATGTGGTGGGTCCGCCAGGCTCCAGGGAAGGGTCTAGAGCGGGTCTCAGCTATTAATCC
GCAGGGTACGCGTACATACTACGCAGACTCCGTGATGGGCCGGTTCACCATCTCCCGCGACAATTCCAAGAACACGCTG
TATCTGCAAATGAACAGCCTGCGTGCCGAGGATACTGCGGTATATTACTGTGCGAAACTTCCGTTTATGTTTGACGACT
GGGGTCAGGGAACCCTGGTCACCGTCTCGAGC (SEQ ID NO: 942)
BMS3h-56-28
GAGGTGCAGCTGTTGGAGTCTGGGGGAGGCTTGGTACAGCCTGGGGGGTCCCTGCGTCTCTCCTGTGCAGCCTCCGGAT
TCACCTTTGCTGGGTATGAGTTGTGGTGGGTCCGCCAGGCTCCAGGGAAGGGTCTAGAGCGGGTCTCAGCTATTAATCC
GCAGGGTACGCGTACATACTACGCAGACTCCGTGATGGGCCGGTTCACCATCTCCCGCGACAATTCCAAGAACACGCTG
TATCTGCAAATGAACAGCCTGCGTGCCGAGGATACCGCGGTATATTACTGTGCGAAACTTCCGTTTACTTTTGACGACT
GGGGTCAGGGAACCCTGGTCACCGTCTCGAGC (SEQ ID NO: 943)
BMS3h-56-29
GAGGTGCAGCTGTTGGAGTCTGGGGGAGGCTTGGTACAGCCTGGGGGGTCCCTGCGTCTCTCCTGTGCAGCCTCCGGAT
TCACCTTTGCTGGGTATGAGTTGTGGTGGGTCCGCCAGGCTCCAGGGAAGGGTCTAGAGCGGGTCTCAGCTATTAATCC
GCAGGGTACGCGTACATACTACGCAGACTCCGTGATGGGCCGGTTCACCATCTCCCGCGACAATTCCAAGAACACGCTG
TATCTGCAAATGAACAGCCTGCGTGCCGAGGATACTGCGGTATATTACTGTGCGAAACTTCCGTTTATGTTTGACGACC
GGGGTCAGGGAACCCTGGTCACCGTCTCGAGC (SEQ ID NO: 944)
BMS3h-56-30
GAGGTGCAGCTGTTGGAGTCTGGGGGAGGCTTGGTACAGCCTGGGGGGTCCCTGCGTCTCTCCTGTGCAGCCTCCGGAT
TCACCTTTGCTGGGTATGAGATGTGGTGGTTCCGCCAGGCTCCAGGGAAGGGTCTAGAGCGGGTCTCAGCTATTAATCC
GCAGGGTACGCGTACATACTACGCAGACTCCGTGATGGGCCGGTTCACCATCTCCCGCGACAATTCCAAGAACACGCTG
TATCTGCAAATGAACAGCCTGCGTGCCGAGGATACCGCGGTATATTACTGTGCGAAACTTCCGTTTACTTTTGACGACT
GGGGTCAGGGAACCCTGGTCACCGTCTCGAGC (SEQ ID NO: 945)
BMS3h-56-31
GAGGTGCAGCTGTTGGAGTCTGGGGGAGGCTTGGTACAGCCTGGGGGGTCCCTGCGTCTCTCCTGTGCAGCCTCCGGAT
TCACCTTTGCTGGGTATGAGATGTGGTGGTTCCGCCAGGCTCCAGGGAAGGGTCTAGAGCGGGTCTCAGCTATTAATCC
GCAGGGTACGCGTACATACTACGCAGACTCCGTGATGGGCCGGTTCACCATCTCCCGCGACAATTCCAAGAACACGCTG
TATCTGCAAATGAACAGCCTGCGTGCCGAGGATACTGCGGTATATTACTGTGCGAAACTTCCGTTTATGTTTGACGACC
GGGGTCAGGGAACCCTGGTCACCGTCTCGAGC (SEQ ID NO: 946)
BMS3h-56-32
GAGGTGCAGCTGTTGGAGTCTGGGGGAGGCTTGGTACAGCCTGGGGGGTCCCTGCGTCTCTCCTGTGCAGCCTCCGGAT
TCACCTTTCGGGATTATGAGATGTGGTGGGTCCGCCAGGCTCCAGGGAAGGGTCTAGAGTGGGTCTCAGCTATTAATCC
GCAGGGTACGCGTACATACTACGCAGACTCCGTGATGGGCCGGTTCACCATCTCCCGCGACAATTCCAAGAACACGCTG
TATCTGCAAATGAACAGCCTGCGTGCCGAGGATACCGCGGTATATTACTGTGCGAAACTTCCGTTTACTTTTGACGACT
GGGGTCAGGGAACCCTGGTCACCGTCTCGAGC (SEQ ID NO: 947)
BMS3h-56-33
GAGGTGCAGCTGTTGGAGTCTGGGGGAGGCTTGGTACAGCCTGGGGGGTCCCTGCGTCTATCCTGTGCAGCCTCCGGAT
TCACCTTTCGGGATTATGAGATGTGGTGGGTCCGCCAGGCTCCAGGGAAGGGTCTAGAGTGGGTCTCAGCTATTAATCC
GCAGGGTACGCGTACATACTACGCAGACTCCGTGATGGGCCGGTTCACCATCTCCCGCGACAATTCCAAGAACACGCTG
TATCTGCAAATGAACAGCCTGCGTGCCGAGGATACTGCGGTATATTACTGTGCGAAACTTCCGTTTATGTTTGACGACC
GGGGTCAGGGAACCCTGGTCACCGTCTCGAGC (SEQ ID NO: 948)
BMS3h-56-202
GAGGTGCAGCTGTTGGAGTCTGGGGGAGGCTTGGTACAGCCTGGGGGGTCCCTGCGTCTCTCCTGTGCAGCCTCCGGAT
TCACCTTTCGGGATTATGAGATGTGGTGGGTCCGCCAGGCTCCAGGGAAGGGTCTAGAGCGGGTCTCAGCTATTAATCC
GCAGGGTACGCGTACATACTACGCAGACTCCGTGAAGGGCCGGTTCACCATCTCCCGCGACAATTCCAAGAACACGCTG
TATCTGCAAATGAACAGCCTGCGTGCCGAGGACACCGCGGTATATTACTGTGCGAAACTTCCGACCTACTTTTCCGACC
GGGGTCAGGGAACCCTGGTCACCGTCTCGAGC (SEQ ID NO: 949)
BMS3h-56-203
GAGGTGCAGCTGTTGGAGTCTGGGGGAGGCTTGGTACAGCCTGGGGGGTCCCTGCGTCTCTCCTGTGCAGCCTCCGGAT
TCACCTTTCGGGATTATGAGATGTGGTGGGTCCGCCAGGCTCCAGGGAAGGGTCTAGAGCGGGTCTCAGCTATTAATCC
GCAGGGTACGCGTACATACTACGCAGACTCCGTGAAGGGCCGGTTCACCATCTCCCGCGACAATTCCAAGAACACGCTG
TATCTGCAAATGAACAGCCTGCGTGCCGAGGACACCGCGGTATATTACTGTGCGAAACTTCCGTTTTTCTTTGAGGAGT
GGGGTCAGGGAACCCTGGTCACCGTCTCGAGC (SEQ ID NO: 950)
BMS3h-56-204
GAGGTGCAGCTGTTGGAGTCTGGGGGAGGCTTGGTACAGCCTGGGGGGTCCCTGCGTCTCTCCTGTGCAGCCTCCGGAT
TCACCTTTCGGGATTATGAGATGTGGTGGGTCCGCCAGGCTCCAGGGAAGGGTCTAGAGCGGGTCTCAGCTATTAATCC
GCAGGGTACGCGTACATACTACGCAGACTCCGTGAAGGGCCGGTTCACCATCTCCCGCGACAATTCCAAGAACACGCTG
TATCTGCAAATGAACAGCCTGCGTGCCGAGGACACCGCGGTATATTACTGTGCGAAACTTCCGACGTACTTTAAGGACT
GGGGTCAGGGAACCCTGGTCACCGTCTCGAGC (SEQ ID NO: 951)
BMS3h-56-205
GAGGTGCAGCTGTTGGAGTCTGGGGGAGGCTTGGTACAGCCTGGGGGGTCCCTGCGTCTCTCCTGTGCAGCCTCCGGAT
TCACCTTTCGGGATTATGAGATGTGGTGGGTCCGCCAGGCTCCAGGGAAGGGTCTAGAGCGGGTCTCAGCTATTAATCC
GCAGGGTACGCGTACATACTACGCAGACTCCGTGAAGGGCCGGTTCACCATCTCCCGCGACAATTCCAAGAACACGCTG
TATCTGCAAATGAACAGCCTGCGTGCCGAGGACACCGCGGTATATTACTGTGCGAAACTTCCGTTTTACTTTTCCGAGT
GGGGTCAGGGAACCCTGGTCACCGTCTCGAGC (SEQ ID NO: 952)
BMS3h-56-206
GAGGTGCAGCTGTTGGAGTCTGGGGGAGGCTTGGTACAGCCTGGGGGGTCCCTGCGTCTCTCCTGTGCAGCCTCCGGAT
TCACCTTTCGGGATTATGAGATGTGGTGGGTCCGCCAGGCTCCAGGGAAGGGTCTAGAGCGGGTCTCAGCTATTAATCC
GCAGGGTACGCGTACATACTACGCAGACTCCGTGAAGGGCCGGTTCACCATCTCCCGCGACAATTCCAAGAACACGCTG
TATCTGCAAATGAACAGCCTGCGTGCCGAGGACACCGCGGTATATCACTGTGCGAAACTTCCGATGTTCTTTGAGGACT
GGGGTCAGGGAACCCTGGTCACCGTCTCGAAC (SEQ ID NO: 953)
BMS3h-56-207
GAGGTGCAGCTGTTGGAGTCTGGGGGAGGCTTGGTACAGCCTGGGGGGTCCCTGCGTCTCTCCTGTGCAGCCTCCGGAT
TCACCTTTCGGGATTATGAGATGTGGTGGGTCCGCCAGGCTCCAGGGAAGGGTCTAGAGCGGGTCTCAGCTATTAATCC
GCAGGGTACGCGTACATACTACGCAGACTCCGTGAAGGGCCGGTTCACCATCTCCCGCGACAATTCCAAGAACACGCTG
TATCTGCAAATGAACAGCCTGCGTGCCGAGGACACCGCGGTATATTACTGTGCGAAACTTCCGTTTCCGTTTTCGGAGT
GGGGTCAGGGAACCCTGGTCACCGTCTCGAGC (SEQ ID NO: 954)
BMS3h-56-208
GAGGTGCAGCTGTTGGAGTCTGGGGGAGGCTTGGTACAGCCTGGGGGGTCCCTGCGTCTCTCCTGTGCAGCCTCCGGAT
TCACCTTTCGGGATTATGAGATGTGGTGGGTCCGCCAGGCTCCAGGGAAGGGTCTAGAGCGGGTCTCAGCTATTAATCC
GCAGGGTACGCGTACATACTACGCAGACTCCGTGAAGGGCCGGTTCACCATCTCCCGCGACAATTCCAAGAACACGCTG
TATCTGCAAATGGACAGCCTGCGTGCCGAGGACACCGCGGTATATTACTGTGCGAAACTTCCGTTTTACTTTTCCGAGT
GGGGTCAGGGAACCCTGGTCACCGTCTCGAGC (SEQ ID NO: 955)
BMS3h-56-209
GAGGTGCAGCTGTTGGAGTCTGGGGGAGGCTTGGTACAGCCTGGGGGGTCCCTGCGTCTCTCCTGTGCAGCCTCCGGAT
TCACCTTTCGGGATTATGAGATGTGGTGGGTCCGCCAGGCTCCAGGGAAGGGTCTAGAGCGGGTCTCAGCTATTAATCC
GTACGGTAACCTCACATACTACGCAGACTCCGTGAAGGGCCGGTTCACCATCTCCCGCGACAATTCCAAGAACACGCTG
TATCTGCAAATGAACAGCCTGCGTGCCGAGGATACCGCGGTATATTACTGTGCGAAACTTCCGTTTACTTTTGAGGACT
GGGGTCAGGGAACCCTGGTCACCGTCTCGAGC (SEQ ID NO: 956)
BMS3h-56-210
GAGGTGCAGCTGTTGGAGTCTGGGGGAGGCTTGGTACAGCCTGGGGGGTCCCTGCGTCTCTCCTGTGCAGCCTCCGGAT
TCACCTTTCGGGATTATGAGATGTGGTGGGTCCGCCAGGCTCCAGGGAAGGGTCTAGAGCGGGTCTCAGCTATTAATCC
GCCCGGTACCTTGACATACTACGCAGACTCCGTGAAGGGCCGGTTCACCATCTCCCGCGACAATTCCAAGAACACGCTG
TATCTGCAAATGAACAGCCTGCGTGCCGAGGATACCGCGGTATATTACTGTGCGAAACTTCCGTTTACTTTTGAGGACC
GGGGTCAGGGAACCCTGGTCACCGTCTCGAGC (SEQ ID NO: 957)
BMS3h-56-211
GAGGTGCAGCTGTTGGAGTCTGGGGGAGGCTTGGTACAGCCTGGGGGGTCCCTGCGTCTCTCCTGTGCAGCCTCCGGAT
TCACCTTTCGGGATTATGAGATGTGGTGGGTCCGCCAGGCTCCAGGGAAGGGTCTAGAGCGGGTCTCAGCTATTAATCC
GTGGGGTGGCTTGACATACTACGCAGACTCCGTGAAGGGCCGGTTCACCATCTCCCGCGACAATTCCAAGAACACGCTG
TATCTGCAAATGAACAGCCTGCGTGCCGAGGATACCGCGGTATATTACTGTGCGAAACTTCCGTTTACTTTTGAGGACT
GGGGTCAGGGAACCCTGGTCACCGTCTCGAGC (SEQ ID NO: 958)
BMS3h-56-212
GAGGTGCAGCTGTTGGAGTCTGGGGGAGGCTTGGTACAGCCTGGGGGGTCCCTGCGTCTCTCCTGTGCAGCCTCCGGAT
TCACCTTTCGGGATTATGAGATGTGGTGGGTCCGCCAGGCTCCAGGGAAGGGTCTAGAGCGGGTCTCAGCTATTAATCC
GATGGGTGGGTTCACATACTACGCAGACTCCGTGAAGGGCCGGTTCACCATCTCCCGCGACAATTCCAAGAACACGCTG
TATCTGCAAATGAACAGCCTGCGTGCCGAGGATACCGCGGTATATTACTGTGCGAAACTTCCGTTTACTTTTGAGGACT
GGGGTCAGGGAACCCTGGTCACCGTCTCGAGC (SEQ ID NO: 959)
BMS3h-56-213
GAGGTGCAGCTGTTGGAGTCTGGGGGAGGCTTGGTACAGCCTGGGGGGTCCCTGCGTCTCTCCTGTGCAGCCTCCGGAT
TCACCTTTCGGGATTATGAGATGTGGTGGGTCCGCCAGGCTCCAGGGAAGGGTCTAGAGCGGGTCTCAGCTATTAATCC
GTGGGGTTCGCACACATACTACGCAGACTCCGTGAAGGGCCGGTTCACCATCTCCCGCGACAATTCCAAGAACACGCTG
TATCTGCAAATGAACAGCCTGCGTGCCGAGGATACCGCGGTATATTACTGTGCGAAACTTCCGTTTACTTTTGAGGACT
GGGGTCAGGGAACCCTGGTCACCGTCTCGAGC (SEQ ID NO: 960)
BMS3h-56-214
GAGGTGCAGCTGTTGGAGTCTGGGGGAGGCTTGGTACAGCCTGGGGGGTCCCTGCGTCTCTCCTGTGCAGCCTCCGGAT
TCACCTTTCGGGATTATGAGATGTGGTGGGTCCGCCAGGCTCCAGGGAAGGGTCTAGAGCGGGTCTCAGCTATTAATCC
GTCCGGTGGGCTGACATACTACGCAGACTCCGTGAAGGGCCGGTTCACCATCTCCCGCGACAATTCCAAGAACACGCTG
TATCTGCAAATGAACAGCCTGCGTGCCGAGGATACCGCGGTATATTACTGTGCGAAACTTCCGTTTACTTTTGACGACC
GGGGTCAGGGAACCCTGGTCACCGTCTCGAGC (SEQ ID NO: 961)
BMS3h-56-215
GAGGTGCAGCTGTTGGAGTCTGGGGGAGGCTTGGTACAGCCTGGGGGGTCCCTGCGTCTCTCCTGTGCAGCCTCCGGAT
TCACCTTTCGGGATTATGAGATGTGGTGGGTCCGCCAGGCTCCAGGGAAGGGTCTAGAGCGGGTCTCAGCTATTAATCC
GCACGGTTCGTTGACATACTACGCAGACTCCGTGAAGGGCCGGTTCACCATCTCCCGCGACAATTCCAAGAACACGCTG
TATCTGCAAATGAACAGCCTGCGTGCCGAGGATACCGCGGTATATTACTGTGCGAAACTTCCGTTTACTTTTGACGACT
GGGGTCAGGGAACCCTGGTCACCGTCTCGAGC (SEQ ID NO: 962)
BMS3h-56-216
GAGGTGCAGCTGTTGGAGTCTGGGGGAGGCTTGGTACAGCCTGGGGGGTCCCTGCGTCTCTCCTGTGCAGCCTCCGGAT
TCACCTTTCGGGATTATGAGATGTGGTGGGTCCGCCAGGCTCCAGGGAAGGGTCTAGAGCGGGTCTCAGCTATTAATCC
GGCCGGTCGGTTGACATACTACGCAGACTCCGTGAAGGGCCGGTTCACCATCTCCCGCGACAATTCCAAGAACACGCTG
TATCTGCAAATGAACAGCCTGCGTGCCGAGGATACCGCGGTATATTACTGTGCGAAACTTCCGTTTACTTTTGAGGACT
GGGGTCAGGGAACCCTGGTCACCGTCTCGAGC (SEQ ID NO: 963)
BMS3h-56-217
GAGGTGCAGCTGTTGGAGTCTGGGGGAGGCTTGGTACAGCCTGGGGGGTCCCTGCGTCTCTCCTGTGCAGCCTCCGGAT
TCACCTTTCGGGATTATGAGATGTGGTGGGTCCGCCAGGCTCCAGGGAAGGGTCTAGAGCGGGTCTCAGCTATTAATCC
GTGGGGTAGCTTGACATACTACGCAGACTCCGTGAAGGGCCGGTTCACCATCTCCCGCGACAATTCCAAGAACACGCTG
TATCTGCAAATGAACAGCCTGCGTGCCGAGGATACCGCGGTATATTACTGTGCGAAACTTCCGTTTACTTTTGAGGACT
GGGGTCAGGGAACCCTGGTCACCGTCTCGAGC (SEQ ID NO: 964)
BMS3h-56-218
GAGGTGCAGCTGTTGGAGTCTGGGGGAGGCTTGGTACAGCCTGGGGGGTCCCTGCGTCTCTCCTGTGCAGCCTCCGGAT
TCACCTTTCCCGACTACGAGATGTGGTGGGTCCGCCAGGCTCCAGGGAAGGGTCTAGAGCGGGTCTCAGCTATTAATCC
GCAGGGTACGCGTACATACTACGCAGACTCCGTGAAGGGCCGGTTCACCATCTCCCGCGACAATTCCAAGAACACGCTG
TATCTGCAAATGAACAGCCTGCGTGCCGAGGATACCGCGGTATATCACTGTGCGAAACTTCCGTTTACTTTTGACGACT
GGGGTCAGGGAACCCTGGTCACCGTCTCGAGC (SEQ ID NO: 965)
BMS3h-56-219
GAGGTGCAGCTGTTGGAGTCTGGGGGAGGCTTGGTACAGCCTGGGGGGTCCCTGCGTCTCTCCTGTGCAGACTCCGGAT
TCACCTTTCCGCCCGTGGAGATGTGGTGGGTCCGCCAGGCTCCAGGGAAGGGTCTAGAGCGGGTCTCAGCTATTAATCC
GCAGGGTACGCGTACATACTACGCAGACTCCGTGAAGGGCCGGTTCACCATCTCCCGCGACAATTCCAAGAACACGCTG
TATCTGCAAATGAACAGCCTGCGTGCCGAGGATACCGCGGTATATTACTGTGCGAAACTTCCGTTTACTTTTGAGGACT
GGGGTCAGGGAACCCTGGTCACCGTCTCGAGC (SEQ ID NO: 966)
BMS3h-56-220
GAGGTGCAGCTGTTGGAGTCTGGGGGAGGCTTGGTACAGCCTGGGGGGTCCCTGCGTCTCTCCTGTGCAGCCTCCGGAT
TCACCTTTCGGGATTATGAGATGTGGTGGGTCCGCCAGGCTCCAGGGAAGGGTCTAGAGCGGGTCTCAGCTATTAATCC
GTACGGTGGGCTGACATACTACGCAGACTCCGTGAAGGGCCGGTTCACCATCTCCCGCGACAATTCCAAGAACACGCTG
TATCTGCAAATGAACAGCCTGCGTGCCGAGGATACCGCGGTATATTACTGTGCGAAACTTCCGTTTACTTTTGACGACT
GGGGTCAGGGAACCCTGGTCACCGTCTCGAGC (SEQ ID NO: 967)
BMS3h-56-221
GAGGTGCAGCTGTTGGAGTCTGGGGGAGGCTTGGTACAGCCTGGGGGGTCCCTGCGTCTCTCCTGTGCAGCCTCCGGAT
TCACCTTTCGGGATTATGAGATGTGGTGGGTCCGCCAGGCTCCAGGGAAGGGTCTAGAGCGGGTCTCAGCTATTAATCC
GTGGGGTAACCACAGATACTACGCAGACTCCGTGAAGGGCCGGTTCACCATCTCCCGCGACAATTCCAAGAACACGCTG
TATCTGCAAATGAACAGCCTGCGTGCCGAGGATACCGCGGTATATTACTGTGCGAAACTTCCGTTTACTTTTGAGGACT
GGGGTCAGGGAACCCTGGTCACCGTCTCGAGC (SEQ ID NO: 968)
BMS3h-56-222
GAGGTGCAGCTGTTGGAGTCTGGGGGAGGCTTGGTACAGCCTGGGGGGTCCCTGCGTCTCTCCTGTGCAGCCTCCGGAT
TCACCTTTCGGGATTATGAGATGTGGTGGGTCCGCCAGGCTCCAGGGAAGGGTCTAGAGCGGGTCTCAGCTATTAATCC
GCACGGTGGCTACACATACTACGCAGACTCCGTGAAGGGCCGGTTCACCATCTCCCGCGACAATTCCAAGAACACGCTG
TATCTGCAAATGAACAGCCTGCGTGCCGAGGATACCGCGGTATATTACTGTGCGAAACTTCCGTTTACTTTTGAGGACT
GGGGTCAGGGAACCCTGGTCACCGTCTCGAGC (SEQ ID NO: 969)
BMS3h-56-223
GAGGTGCAGCTGTTGGAGTCTGGGGGAGGCTTGGTACAGCCTGGGGGGTCCCTGCGTCTCTCCTGTGCAGCCTCCGGAT
TCACCTTTCGGGATTATGAGATGTGGTGGGTCCGCCAGGCTCCAGGGAGGGGTCTAGAGCGGGTCTCAGCTATTAATCC
GCCCGGTATGCTCACATACTACGCAGACTCCGTGAAGGGCCGGTTCACCATCTCCCGCGACAATTCCAAGAACACGCTG
TATCTGCAAATGAACAGCCTGCGTGCCGAGGATACCGCGGTATATTACTGTGCGAAACTTCCGTTTACTTTTGACGACT
GGGGTCAGGGAACCCTGGTCACCGTCTCGAGC (SEQ ID NO: 970)
BMS3h-56-224
GAGGTGCAGCTGTTGGAGTCTGGGGGAGGCTTGGTACAGCCTGGGGGGTCCCTGCGTCTCTCCTGTGCAGCCTCCGGAT
TCACCTTTCGGGATTATGAGATGTGGTGGGTCCGCCAGGCTCCAGGGAAGGGTCTAGAGCGGGTCTCAGCTATTAATCC
GTGGGGTCAGTTGACATACTACGCAGACTCCGTGAAGGGCCGGTTCACCATCTCCCGCGACAATTCCAAGAACACGCTG
TATCTGCAAATGAACAGCCTGCGTGCCGAGGATACCGCGGTATATTACTGTGCGAAACTTCCGTTTACTTTTGAGGACT
GGGGTCAGGGAACCCTGGTCACCGTCTCGAGC (SEQ ID NO: 971)
BMS3h-56-225
GAGGTGCAGCTGTTGGAGTCTGGGGGAGGCTTGGTACAGCCTGGGGGGTCCCTGCGTCTCTCCTGTGCAGCCTCCGGAT
TCACCTTTCGGGATTATGAGATGTGGTGGGTCCGCCAGGCTCCAGGGAAGGGTCTAGAGCGGGTCTCAGCTATTAATCC
GTGGGGTGGCTACACATACTACGCAGACTCCGTGAAGGGCCGATTCACCATCTCCCGCGACAATTCCAAGAACACGCTG
TATCTGCAAATGAACAGCCTGCGTGCCGAGGATACCGCGGTATATTACTGTGCGAAACTTCCGTTTACTTTTGACGACT
GGGGTCAGGGAACCCTGGTCACCGTCTCGAGC (SEQ ID NO: 972)
BMS3h-56-226
GAGGTGCAGCTGTTGGAGTCTGGGGGAGGCTTGGTACAGCCTGGGGGGTCCCTGCGTCTCTCCTGTGCAGCCTCCGGAT
TCACCTTTCGGGATTATGAGATGTGGTGGGTCCGCCAGGCTCCAGGGAAGGGTCTAGAGCGGGTCTCAGCTATTAATCC
GTCGGGTGGGCTGACATACTACGCAGACTCCGTGAAGGGCCGGTTCACCATCTCCCGCGACAATTCCAAGAACACGCTG
TATCTGCAAATGAACAGCCTGCGTGCCGAGGATACCGCGGTATATTACTGTGCGAAACTTCCGTTTACTTTTGAGGACT
GGGGTCAGGGAACCCTGGTCACCGTCTCGAGC (SEQ ID NO: 973)
BMS3h-56-227
GAGGTGCAGCTGTTGGAGTCTGGGGGAGGCTTGGTACAGCCTGGGGGGTCCCTGCGTCTCTCCTGTGCAGCCTCCGGAT
TCACCTTTCGGGATTATGAGATGTGGTGGGTCCGCCAGGCTCCAGGGAAGGGTCTAGAGCGGGTCTCAGCTATTAATCC
GTCGGGTGGGTTGACATACTACGCAGACTCCGTGAAGGGCCGGTTCACCATCTCCCGCGACAATTCCAAGAACACGCTG
TATCTGCAAATGAACAGCCTGCGTGCCGAGGATACCGCGGTATATTACTGTGCGAAACTTCCGTTTACTTTTGACGACT
GGGGTCAGGGAACCCTGGTCACCGTCTCGAGC (SEQ ID NO: 974)
BMS3h-56-228
GAGGTGCAGCTGTTGGAGTCTGGGGGAGGCTTGGTACAGCCTGGGGGGTCCCTGCGTCTCTCCTGTGCAGCCTCCGGAT
TCACCTTTCGGGATTATGAGATGTGGTGGGTCCGCCAGGCTCCAGGGAAGGGTCTAGAGCGGGTCTCAGCTATTAATCC
GTCGGGTACGCTCACATACTACGCAGACTCCGTGAAGGGCCGGTTCACCATCTCCCGCGACAATTCCAAGAACACGCTG
TATCTGCAAATGAACAGCCTGCGTGCCGAGGATACCGCGGTATATTACTGTGCGAAACTTCCGTTTACTTTTGAGGACT
GGGGTCAGGGAACCCTGGTCACCGTCTCGAGC (SEQ ID NO: 975)
BMS3h-56-229
GAGGTGCAGCTGTTGGAGTCTGGGGGAGGCTTGGTACAGCCTGGGGGGTCCCTGCGTCTCTCCTGTGCAGCCTCCGGAT
TCACCTTTCGGGATTATGAGATGTGGTGGGTCCGCCAGGCTCCAGGGAAGGGTCTAGAGCGGGTCTCAGCTATTAATCC
GTACGGTTCGTTGACATACTACGCAGACTCCGTGAAGGGCCGGTTCACCATCTCCCGCGACAATTCCAAGAACACGCTG
TATCTGCAAATGAACAGCCTGCGTGCCGAGGATACCGCGGTATATTACTGTGCGAAACTTCCGTTTACTTTTGACGACT
GGGGTCAGGGAACCCTGGTCACCGTCTCGAGC (SEQ ID NO: 976)
BMS3h-56-230
GAGGTGCAGCTGTTGGAGTCTGGGGGAGGCTTGGTACAGCCTGGGGGGTCCCTGCGTCTCTCCTGTGCAGCCTCCGGAT
TCACCTTTCGGGATTATGAGATGTGGTGGGTCCGCCAGGCTCCAGGGAAGGGTCTAGAGCGGGTCTCAGCTATTAATCC
GTGGGGTGGCTACACATACTACGCAGACTCCGTGAAGGGCCGGTTCACCATCTCCCGCGACAATTCCAAGAACACGCTG
TATCTGCAAATGAACAGCCTGCGTGCCGAGGATACCGCGGTATATTACTGTGCGAAACTTCCGTTTACTTTTGAGGACT
GGGGTCAGGGAACCCTGGTCACCGTCTCGAGC (SEQ ID NO: 977)
BMS3h-56-231
GAGGTGCAGCTGTTGGAGTCTGGGGGAGGCTTGGTACAGCCTGGGGGGTCCCTGCGTCTCTCCTGTGCAGCCTCCGGAT
TCACCTTTCGGGATTATGAGATGTGGTGGGTCCGCCAGGCTCCAGGGAAGGGTCTAGAGCGGGTCTCAGCTATTAATCC
GCAGGGTGGGCTGACATACTACGCAGACTCCGTGAAGGGCCGGTTCACCATCTCCCGCGACAATTCCAAGAACACGCTG
TATCTGCAAATGAACAGCCTGCGTGCCGAGGATACCGCGGTATATTACTGTGCGAAACTTCCGTTTACTTTTGAGGACT
GGGGTCAGGGAACCCTGGTCACCGTCTCGAGC (SEQ ID NO: 978)
BMS3h-56-232
GAGGTGCAGCTGTTGGAGTCTGGGGGAGGCTTGGTACAGCCTGGGGGGTCCCTGCGTCTCTCCTGTGCAGCCTCCGGAT
TCACCTTTCGGGATTATGAGATGTGGTGGGTCCGCCAGGCTCCAGGGAAGGGTCTAGAGCGGGTCTCAGCTATTAATCC
GTGGGGTTCCCACACATACTACGCAGACTCCGTGAAGGGCCGGTTCACCATCTCCCGCGACAATTCCAAGAACACGCTG
TATCTGCAAATGAACAGCCTGCGTGCCGAGGATACCGCGGTATATTACTGTGCGAAACTTCCGTTTACTTTTGACGACT
GGGGTCAGGGAACCCTGGTCACCGTCTCGAGC (SEQ ID NO: 979)
BMS3h-56-233
GAGGTGCAGCTGTTGGAGTCTGGGGGAGGCTTGGTACAGCCTGGGGGGTCCCTGCGTCTCTCCTGTGCAGCCTCCGGAT
TCACCTTTCGGGATTATGAGATGTGGTGGGTCCGCCAGGCTCCAGGGAAGGGTCTAGAGCGGGTCTCAGCTATTAATCC
GTGGGGTACCTTGACATACTACGCAGACTCCGTGAAGGGCCGGTTCACCATCTCCCGCGACAATTCCAGGAACACGCTG
TATCTGCAAATGAACAGCCTGCGTGCCGAGGATACCGCGGTATATTACTGTGCGAAACTTCCGTTTACTTTTGACGACT
GGGGTCAGGGAACCCTGGTCACCGTCTCGAGC (SEQ ID NO: 980)
BMS3h-56-234
GAGGTGCAGCTGTTGGAGTCTGGGGGAGGCTTGGTACAGCCTGGGGGGTCCCTGCGTCTCTCCTGTGCAGCCTCCGGAT
TCACCTTTCGGGATTATGAGATGTGGTGGGTCCGCCAGGCTCCAGGGAAGGGTCTAGAGCGGGTCTCAGCTATTAATCC
GAACGGTCGGCTGACATACTACGCAGACTCCGTGAAGGGCCGGTTCACCATCTCCCGCGACAATTCCAAGAACACGCTG
TATCTGCAAATGAACAGCCTGCGTGCCGAGGATACCGCGGTATATTACTGTGCGAAACTTCCGTTTACTTTTGCGGACT
GGGGTCAGGGAACCCTGGTCACCGTCTCGAGC (SEQ ID NO: 981)
BMS3h-56-235
GAGGTGCAGCTGTTGGAGTCTGGGGGAGGCTTGGTACAGCCTGGGGGGTCCCTGCGTCTCTCCTGTGCAGCCTCCGGAT
TCACCTTTCGGGATTATGAGATGTGGTGGGTCCGCCAGGCTCCAGGGAAGGGTCTAGAGCGGGTCTCAGCTATTAATCC
GTGGGGTCAGCTGACATACTACGCAGACTCCGTGAAGGGCCGGTTCACCATCTCCCGCGACAATTCCAAGAACACGCTG
TATCTGCAAATGAACAGCCTGCGTGCCGAGGATACCGCGGTATATTACTGTGCGAAACTTCCGTTTACTTTTGACGACT
GGGGTCAGGGAACCCTGGTCACCGTCTCGAGC (SEQ ID NO: 982)
BMS3h-56-236
GAGGTGCAGCTGTTGGAGTCTGGGGGAGGCTTGGTACAGCCTGGGGGGTCCCTGCGTCTCTCCTGTGCAGCCTCCGGAT
TCACCTTTCGGGATTATGAGATGTGGTGGGTCCGCCAGGCTCCAGGGAAGGGTCTAGAGCGGGTCTCAGCTATTAATCC
GCACGGTGGCCTCACATACTACGCAGACTCCGTGAAGGGCCGGTTCACCATCTCCCGCGACAATTCCAAGAACACGCTG
TATCTGCAAATGAACAGCCTGCGTGCCGAGGATACCGCGGTATATTACTGTGCGAAACTTCCGTTTACTTTTGACGACT
GGGGTCAGGGAACCCTGGTCACCGTCTCGAGC (SEQ ID NO: 983)
BMS3h-56-237
GAGGTGCAGCTGTTGGAGTCTGGGGGAGGCTTGGTACAGCCTGGGGGGTCCCTGCGTCTCTCCTGTGCAGCCTCCGGAT
TCACCTTTCGGGATTATGAGATGTGGTGGGTCCGCCAGGCTCCAGGGAAGGGTCTGGAGCGGGTCTCAGCTATTAATCC
GGCGGGTATGTTGACATACTACGCAGACTCCGTGAAGGGCCGGTTCACCATCTCCCGCGACAATTCCAAGAACACGCTG
TATCTGCAAATGAACAGCCTGCGTGCCGAGGATACCGCGGTATATTACTGTGCGAAACTTCCGTTTACTTTTGACGACT
GGGGTCAGGGAACCCTGGTCACCGTCTCGAGC (SEQ ID NO: 984)
BMS3h-56-238
GAGGTGCAGCTGTTGGAGTCTGGGGGAGGCTTGGTACAGCCTGGGGGGTCCCTGCGTCTCTCCTGTGCAGCCTCCGGAT
TCACCTTTCGGGATTATGAGATGTGGTGGGTCCGCCAGGCTCCAGGGAAGGGTCTAGAGCGGGTCTCAGCTATTAATCC
GCACGGTACCTTGACATACTACGCAGACTCCGTGAAGGGCCGGTTCACCATCTCCCGCGACAATTCCAAGAACACGCTG
TATCTGCAAATGAACAGCCTGCGTGCCGAGGATACCGCGGTATATTACTGTGCGAAACTTCCGTTTACTTTTGAGGACT
GGGGTCAGGGAACCCTGGTCACCGTCTCGAGC (SEQ ID NO: 985)
BMS3h-56-239
GAGGTGCAGCTGTTGGAGTCTGGGGGAGGCTTGGTACAGCCTGGGGGGTCCCTGCGTCTCTCCTGTGCAGCCTCCGGAT
TCACCTTTCGGGATTATGAGATGTGGTGGGTCCGCCAGGCTCCAGGGAAGGGTCTAGAGCGGGTCTCAGCTATTAATCC
GTGGGGTTCGTTGACATACTACGCAGACTCCGTGAAGGGCCGGTTCACCATCTCCCGCGACAATTCCAAGAACACGCTG
TATCTGCAAATGAACAGCCTGCGTGCCGAGGATACCGCGGTATATTACTGTGCGAAACTTCCGTTTACTTTTGACGACT
GGGGTCAGGGAACCCTGGTCACCGTCTCGAGC (SEQ ID NO: 986)
BMS3h-56-240
GAGGTGCAGCTGTTGGAGTCTGGGGGAGGCTTGGTACAGCCTGGGGGGTCCCTGCGTCTCTCCTGTGCAGCCTCCGGAT
TCACCTTTCGGGATTATGAGATGTGGTGGGTCCGCCAGGCTCCAGGGAAGGGTCTAGAGCGGGTCTCAGCTATTAATCC
GTACGGTGGCCTGACATACTACGCAGACTCCGTGAAGGGCCGGTTCACCATCTCCCGCGACAATTCCAAGAACACGCTG
TATCTGCAAATGAACAGCCTGCGTGCCGAGGATACCGCGGTATATTACTGTGCGAAACTTCCGTTTACTTTTGAGGACT
GGGGTCAGGGAACCCTGGTCACCGTCTCGAGC (SEQ ID NO: 987)
BMS3h-56-241
GAGGTGCAGCTGTTGGAGTCTGGGGGAGGCTTGGTACAGCCTGGGGGGTCCCTGCGTCTCTCCTGTGCAGCCTCCGGAT
TCACCTTTCGGGATTACGAGATGTGGTGGGTCCGCCAGGCTCCAGGGAAGGGTCTAGAGCGGGTCTCAGCTATTAATCC
GGCCGGTTTCTTGACATACTACGCAGACTCCGTGAAGGGCCGGTTCACCATCTCCCGCGACAATTCCAAGAACACGCTG
TATCTGCAAATGAACAGCCTGCGTGCCGAGGATACCGCGGTATATTACTGTGCGAAACTTCCGTTTACTTTTGAGGACT
GGGGTCAGGGAACCCTGGTCACCGTCTCGAGC (SEQ ID NO: 988)
BMS3h-56-242
GAGGTGCAGCTGTTGGAGTCTGGGGGAGGCTTGGTACGGCCTGGGGGGTCCCTGCGTCTCTCCTGTGCAGCCTCCGGAT
TCACCTTTCGGGATTATGAGATGTGGTGGGTCCGCCAGGCTCCAGGGAAGGGTCTGGAGCGGGTCTCAGCTATTAATCC
GTACGGTGGCCTGACATACTACGCAGACTCCGTGAAGGGCCGGTTCACCATCTCCCGCGACAATTCCAAGAACACGCTG
TATCTGCAAATGAACAGCCTGCGTGCCGAGGATACCGCGGTATATTACTGTGCGAAACTTCCGTTTACTTTTGAGGACT
GGGGTCAGGGAACCCTGGTCACCGTCTCGAGC (SEQ ID NO: 989)
BMS3h-56-243
GAGGTGCAGCTGTTGGAGTCTGGGGGAGGCTTGGTACAGCCTGGGGGGTCCCTGCGTCTCTCCTGTGCAGCCTCCGGAT
TCACCTTTCGGGATTATGAGATGTGGTGGGTCCGCCAGGCTCCAGGGAAGGGTCTAGAGCGGGTCTCAGCTATTAATCC
GTGGGGTGGGTTCACATACTACGCAGACTCCGTGAAGGGCCGGTTCACCATCTCCCGCGACAATTCCAAGAACACGCTG
TATCTGCAAATGAACAGCCTGCGTGCCGAGGATACCGCGGTATATTACTGTGCGAAACTTCCGTTTACTTTTGAGGACT
GGGGTCAGGGAACCCTGGTCACCGTCTCGAGC (SEQ ID NO: 990)
BMS3h-56-244
GAGGTGCAGCTGTTGGAGTCTGGGGGAGGCTTGGTACAGCCTGGGGGGTCCCTGCGTCTCTCCTGTGCAGCCTCCGGAT
TCACCTTTCGGGATTATGAGATGTGGTGGGTCCGCCAGGCTCCAGGGAAGGGTCTAGAGCGGGTCTCAGCTATTAATCC
GTGGGGTGGGTTGACATACTACGCAGACTCCGTGAAGGGCCGGTTCACCATCTCCCGCGACAATTCCAAGAACACGCTG
TATCTGCAAATGAACAGCCTGCGTGCCGAGGATACCGCGGTATATTACTGTGCGAAACTTCCGTTTACTTTTGACGACT
GGGGTCAGGGAACCCTGGTCACCGTCTCGAGC (SEQ ID NO: 991)
BMS3h-56-245
GAGGTGCAGCTGTTGGAGTCTGGGGGAGGCTTGGTACAGCCTGGGGGGTCCCTGCGTCTCTCCTGTGCAGCCTCCGGAT
TCACCTTTCGGGATTATGAGATGTGGTGGGTCCGCCAGGCTCCAGGGAAGGGTCTAGAGCGGGTCTCAGCTATTAATCC
GTACGGTGGGCTGACATACTACGCAGACTCCGTGAAGGGCCGGTTCACCATCTCCCGCGACAATTCCAAGAACACGCTG
TATCTGCAAATGGACAGCCTGCGTGCCGAGGATAGCGCGGTATATTACTGTGCGAAACTTCCGTTTACTTTTGAGGACT
GGGGTCAGGGAACCCTGGTCACCGTCTCGAGC (SEQ ID NO: 992)
BMS3h-56-246
GAGGTGCAGCTGTTGGAGTCTGGGGGAGGCTTGGTACAGCCTGGGGGGTCCCTGCGTCTCTCCTGTGCAGCCTCCGGAT
TCACCTTTCGGGATTATGAGATGTGGTGGGTCCGCCAGGCTCCAGGGAAGGGTCTAGAGCGGGTCTCAGCTATTAATCC
GTGGGGTACGTTGACATACTACGCAGACTCCGTGAAGGGCCGGTTCACCATCTCCCGCGACAATTCCAAGAACACGCTG
TATCTGCAAATGAACAGCCTGCGTGCCGAGGATACCGCGGTATATTACTGTGCGAAACTTCCGTTTACTTTTGAGGACT
GGGGTCAGGGAACCCTGGTCACCGTCTCGAGC (SEQ ID NO: 993)
BMS3h-56-247
GAGGTGCAGCTGTTGGAGTCTGGGGGAGGCTTGGTACAGCCTGGGGGGTCCCTGCGTCTCTCCTGTGCAGCCTCCGGAT
TCACCTTTCGGGATTATGAGATGTGGTGGGTCCGCCAGGCTCCAGGGAAGGGTCTAGAGCGGGTCTCAGCTATTAATCC
GTGGGGTGGCTACACATACTACGCAGACTCCGTGAAGGGCCGGTTCACCATCTCCCGCGACAATTCCAAGAACACGCTG
TATCTGCAAATGAACAGCCTGCGTGCCGAGGATACCGCGGTATATTACTGTGCGAAACTTCCGTTTACTTTTGAGGACT
GGGGTCGGGGAACCCTGGTCACCGTCTCGAGC (SEQ ID NO: 994)
BMS3h-56-248
GAGGTGCAGCTGTTGGAGTCTGGGGGAGGCTTGGTACAGCCTGGGGGGTCCCTGCGTCTCTCCTGTGCAGCCTCCGGAT
TCACCTTTCGGGATTATGAGATGTGGTGGGTCCGCCAGGCTCCAGGGAAGGGTCTAGAGCGGGTCTCAGCTATTAATCC
GTACGGTAACCTGACATACTACGCAGACTCCGTGAAGGGCCGGTTCACCATCTCCCGCGACAATTCCAAGAACACGCTG
TATCTGCAAATGAACAGCCTGCGTGCCGAGGATACCGCGGTATATTACTGTGCGAAACTTCCGTTTACTTTTGACGACT
GGGGTCAGGGAACCCTGGTCACCGTCTCGAGC (SEQ ID NO: 995)
BMS3h-56-249
GAGGTGCAGCTGTTGGAGTCTGGGGGAGGCTTGGTACAGCCTGGGGGGTCCCTGCGTCTCTCCTGTGCAGCCTCCGGAT
TCACCTTTCGGGATTATGAGATGTGGTGGGTCCGCCAGGCTCCAGGGAAGGGTCTAGAGCGGGTCTCAGCTATTAATCC
GCACGGTGGGTTCACATACTACGCAGACTCCGTGAAGGGCCGGTTCACCATCTCCCGCGACAATTCCAAGAACACGCTG
TATCTGCAAATGAACAGCCTGCGTGCCGAGGATACCGCGGTATATTACTGTGCGAAACTTCCGTTTACTTTTGAGGACT
GGGGTCAGGGAACCCTGGTCACCGTCTCGAGC (SEQ ID NO: 996)
BMS3h-56-250
GAGGTGCAGCTGTTGGAGTCTGGGGGAGGCTTGGTACAGCCTGGGGGGTCCCTGCGTCTCTCCTGTGCAGCCTCCGGAT
TCACCTTTCGGGATTATGAGATGTGGTGGGTCCGCCAGGCTCCAGGGAAGGGTCTAGAGCGGGTCTCAGCTATTAATCC
GGCCGGTTTCTACACATACTACGCAGACTCCGTGAAGGGCCGGTTCACCATCTCCCGCGACAATTCCAAGAACACGCTG
TATCTGCAAATGAACAGCCTGCGTGCCGAGGATACCGCGGTATATTACTGTGCGAAACTTCCGTTTACTTTTGACGACT
GGGGTCAGGGAACCCTGGTCACCGTCTCGAGC (SEQ ID NO: 997)
BMS3h-56-251
GAGGTGCAGCTGTTGGAGTCTGGGGGAGGCTTGGTACAGCCTGGGGGGTCCCTGCGTCTCTCCTGTGCAGCCTCCGGAT
TCACCTTTCGGGATTATGAGATGTGGTGGGTCCGCCAGGCTCCAGGGAAGGGTCTAGAGCGGGTCTCAGCTATTAATCC
GGCGGGTGGCCTCACATACTACGCAGACTCCGTGAAGGGCCGGTTCACCATCTCCCGCGACAATTCCAAGAACACGCTG
TATCTGCAAATGAACAGCCTGCGTGCCGAGGATACCGCGGTATATTACTGTGCGAAACTTCCGTTTACTTTTGACGACT
GGGGTCAGGGAACCCTGGTCACCGTCTCGAGC (SEQ ID NO: 998)
BMS3h-56-252
GAGGTGCAGCTGTTGGAGTCTGGGGGAGGCTTGGTACAGCCTGGGGGGTCCCTGCGTCTCTCCTGTGCAGCCTCCGGAT
TCGCCTTTCGGGATTATGAGATGTGGTGGGTCCGCCAGGCTCCAGGGAAGGGTCTAGAGCGGGTCTCAGCTATTAATCC
GCACGGTTCCCTCACATACTACGCAGACTCCGTGAAGGGCCGGTTCACCATCTCCCGCGACAATTCCAAGAACACGCTG
TATCTGCAAATGAACAGCCTGCGTGCCGAGGATACCGCGGTATATTACTGTGCGAAACTTCCGTTTACTTTTGAGGACT
GGGGTCAGGGAACCCTGGTCACCGTCTCGAGC (SEQ ID NO: 999)
BMS3h-56-253
GAGGTGCAGCTGTTGGAGTCTGGGGGAGGCTTGGTACAGCCTGGGGGGTCCCTGCGTCTCTCCTGTGCAGCCTCCGGAT
TCACCTTTCGTGATTATGAGATGTGGTGGGTCCGCCAGGCTCCAGGGAAGGGTCTAGAGCGGGTCTCAGCTATTAATCC
GGCCGGTGGGTACACATACTACGCAGACTCCGTGAAGGGCCGGTTCACCATCTCCCGCGACAATTCCAAGAACACGCTG
TATCTGCAAATGAACAGCCTGCGTGCCGAGGATACCGCGGTATATCACTGTGCGAAACTTCCGTTTACTTTTGAGGACT
GGGGTCAGGGAACCCTGGTCACCGTCTCGAGC (SEQ ID NO: 1000)
BMS3h-56-254
GAGGTGCAGCTGTTGGAGTCTGGGGGAGGCTTGGTACAGCCTGGGGGGTCCCTGCGTCTCTCCTGTGCAGCCTCCGGAT
TCACCTTTCGGGATTATGAGATGTGGTGGGTCCGCCAGGCTCCAGGGAAGGGTCTAGAGCGGGTCTCAGCTATTAATCC
GCAGGGTACGCGTACATACTACGCAGACTCCGTGAAGGGCCGGTTCACCATCTCCCGCGACAATTCCAAGAACACGCTG
TATCTGCAAATGAACAGCCTGCGTGCCGAGGACACCGCGGTATATTACTGTGCGAAACTTCCGTTTTGGTTTACGGAGT
GGGGTCAGGGAACCCTGGTCACCGTCTCGAGC (SEQ ID NO: 1001)
BMS3h-56-255
GAGGTGCAGCTGTTGGAGTCTGGGGGAGGCTTGGTACAGCCTGGGGGGTCCCTGCGTCTCTCCTGTGCAGCCTCCGGAT
TCACCTTTCGGGATTATGAGATGTGGTGGGTCCGCCAGGCTCCAGGGAAGGGTCTAGAGCGGGTCTCAGCTATTAATCC
GCAGGGTACGCGTACATACTACGCAGACTCCGTGAAGGGCCGGTTCACCATCTCCCGCGACAATTCCAAGAACACGCTG
TATCTGCAAATGAACAGCCTGCGTGCCGAGGATACCGCGGTATATTACTGTGCGAAACTTCCGTTCATGTTTTCCGACC
GGGGTCAGGGAACCCTGGTCACCGTCTCGAGC (SEQ ID NO: 1002)
BMS3h-56-256
GAGGTGCAGCTGTTGGAGTCTGGGGGAGGCTTGGTACAGCCTGGGGGGTCCCTGCGTCTCTCCTGTGCAGCCTCCGGAT
TCACCTTTCGGGATTATGAGATGTGGTGGGTCCGCCAGGCTCCAGGGAAGGGTCTAGAGCGGGTCTCAGCTATTAATCC
GCAGGGTACGCGTACATACTACGCAGACTCCGTGAAGGGCCGGTTCACCATCTCCCGCGACAATTCCAAGAACACGCTG
TATCTGCAAATGAACAGCCTGCGTGCCGAGGACACCGCGGTATATTACTGTGCGAAACTTCCGTTTTTGTTTCAGGAGT
GGGGTCAGGGAACCCTGGTCACCGTCTCGAGC (SEQ ID NO: 1003)
BMS3h-56-257
GAGGTGCAGCTGTTGGAGTCTGGGGGAGGCTTGGTACAGCCTGGGGGGTCCCTGCGTCTCTCCTGTGCAGCCTCCGGAT
TCACCTTTCGGGATTATGAGATGTGGTGGGTCCGCCAGGCTCCAGGGAAGGGTCTAGAGCGGGTCTCAGCTATTAATCC
GCAGGGTACGCGTACATACTACGCAGACTCCGTGAAGGGCCGGTTCACCATCTCCCGCGACAATTCCAAGAACACGCTG
TATCTGCAAATGAACAGCCTGCGTGCCGAGGACACCGCGGTATATTACTGTGCGAAACTTCCGACGCGGTTTGAGGACT
GGGGTCAGGGAACCCTGGTCACCGTCTCGAGC (SEQ ID NO: 1004)
BMS3h-56-258
GAGGTGCAGCTGTTGGAGTCTGGGGGAGGCTTGGTACAGCCTGGGGGGTCCCTGCGTCTCTCCTGTGCAGCCTCCGGAT
TCACCTTTCGGGATTATGAGATGTGGTGGGTCCGCCAGGCTCCAGGGAAGGGTCTAGAGCGGGTCTCAGCTATTAATCC
GCAGGGTACGCGTACATACTACGCAGACTCCGTGAAGGGCCGGTTCACCATCTCCCGCGACAATTCCAAGAACACGCTG
TATCTGCAAATGAACAGCCTGCGTGCCGAGGACACCGCGGTATATTACTGTGCGAAACTTCCGTTTTACTTTCACGAGT
GGGGTCAGGGAACCCTGGTCACCGTCTCGAGC (SEQ ID NO: 1005)
BMS3h-56-259
GAGGTGCAGCTGTTGGAGTCTGGGGGAGGCTTGGTACAGCCTGGGGGGTCCCTGCGTCTCTCCTGTGCAGCCTCCGGAT
TCACCTTTCGGGATTATGAGATGTGGTGGGTCCGCCAGGCTCCAGGGAAGGGTCTAGAGCGGGTCTCAGCTATTAATCC
GCAGGGTACGCGTACATACTACGCAGACTCCGTGAAGGGCCGGTTCACCATCTCCCGCGACAATTCCAAGAACACGCTG
TATCTGCAAATGAACAGCCTGCGTGCCGAGGATACCGCGGTATATTACTGTGGGAAAGAGCCGTTTCGTTATGACTACT
GGGGTCAGGGAACCCTGGTCACCGTCTCGAGC (SEQ ID NO: 1006)
BMS3h-56-260
GAGGTGCAGCTGTTGGAGTCTGGGGGAGGCTTGGTACAGCCTGGGGGGTCCCTGCGTCTCTCCTGTGCAGCCTCCGGAT
TCACCTTTCGGGATTATGAGATGTGGTGGGTCCGCCAGGCTCCAGGGAAGGGTCTAGAGCGGGTCTCAGCTATTAATCC
GCAGGGTACGCGTACATACTACGCAGACTCCGTGAAGGGCCGGTTCACCATCTCCCGCGACAATTCCAAGAACACGCTG
TATCTGCAAATGAACAGCCTGCGTGCCGAGGACACCGCGGTATATTACTGTGCGAAACTTCCGACGTTCTTTAAGGACT
GGGGTCAGGGAACCCTGGTCACCGTCTCGAGC (SEQ ID NO: 1007)
BMS3h-56-261
GAGGTGCAGCTGTTGGAGTCTGGGGGAGGCTTGGTACAGCCTGGGGGGTCCCTGCGTCTCTCCTGTGCAGCCTCCGGAT
TCACCTTTCGGGATTATGAGATGTGGTGGGTCCGCCAGGCTCCAGGGAAGGGTCTAGAGCGGGTCTCAGCTATTAATCC
GCAGGGTACACGTACATACTACGCAGACTCCGTGAAGGGCCGGTTCACCATCTCCCGCGACAATTCCAAGAACACGCTG
TATCTGCAAATGAACAGCCTGCGTGCCGAGGATACCGCGGTATATTACTGTGCGAAACTTCCGTTTTTCTTTCAGGAGT
GGGGTCAGGGAACCCTGGTCACCGTCTCGAGC (SEQ ID NO: 1008)
BMS3h-56-262
GAGGTGCAGCTGTTGGAGTCTGGGGGAGGCTTGGTACAGCCTGGGGGGTCCCTGCGTCTCTCCTGTGCAGCCTCCGGAT
TCACCTTTCGGGATTATGAGATGTGGTGGGTCCGCCAGGCTCCAGGGAAGGGTCTAGAGCGGGTCTCAGCTATTAATCC
GCAGGGTACGCGTACATACTACGCAGACTCCGTGAAGGGCCGGTTCACCATCTCCCGCGACAATTCCAAGAACACGCTG
TATCTGCAAATGAACAGCCTGCGTGCCGAGGACACCGCGGTATATTACTGTGCGAAACTTCCGCAGTTGTTTCACGACC
GGGGTCAGGGAACCCTGGTCACCGTCTCGAGC (SEQ ID NO: 1009)
BMS3h-56-263
GAGGTGCAGCTGTTGGAGTCTGGGGGAGGCTTGGTACAGCCTGGGGGGTCCCTGCGTCTCTCCTGTGCAGCCTCCGGAT
TCACCTTTCGGGATTATGAGATGTGGTGGGTCCGCCAGGCTCCAGGGAAGGGTCTAGAGCGGGTCTCAGCTATTAATCC
GCAGGGTACGCGTACATACTACGCAGACTCCGTGAAGGGCCGGTTCACCATCTCCCGCGACAATTCCAAGAACACGCTG
TATCTGCAAATGAACAGCCTGCGTGCCGAGGACACCGCGGTATATTACTGTGCGAAACTTCCGCAGCTCTTTGAGGACT
GGGGTCAGGGAACCCTGGTCACCGTCTCGAGC (SEQ ID NO: 1010)
BMS3h-56-264
GAGGTGCAGCTGTTGGAGTCTGGGGGAGGCTTGGTACAGCCTGGGGGGTCCCTGCGTCTCTCCTGTGCAGCCTCCGGAT
TCACCTTTCGGGATTATGAGATGTGGTGGGTCCGCCAGGCTCCAGGGAAGGGTCTAGAGCGGGTCTCAGCTATTAATCC
GCAGGGTACGCGTACATACTACGCAGACTCCGTGAAGGGCCGGTTCACCATCTCCCGCGACAATTCCAAGAACACGCTG
TATCTGCAAATGAACAGCCTGCGTGCCGAGGATACCGCGGTATATCACTGTGCGAAACTTCCGTTTGGGTTTTCCGAGT
GGGGTCAGGGAACCCTGGTCACCGTCTCGAGC (SEQ ID NO: 1011)
BMS3h-56-265
GAGGTGCAGCTGTTGGAGTCTGGGGGAGGCTTGGTACAGCCTGGGGGGTCCCTGCGTCTCTCCTGTGCAGCCTCCGGAT
TCACCTTTCGGGATTATGAGATGTGGTGGGTCCGCCAGGCTCCAGGGAAGGGTCTAGAGCGGGTCTCAGCTATTAATCC
GCAGGGTACGCGTACATACTACGCAGACTCCGTGAAGGGCCGGTTCACCATCTCCCGCGACAATTCCAAGAACACGCTG
TATCTGCAAATGAACAGCCTGCGTGCCGAGGACACCGCGGTATATTACTGTGCGAAACTTCCGCAGTTGTTTCAGGACT
GGGGTCAGGGAACCCTGGTCACCGTCTCGAGC (SEQ ID NO: 1012)
BMS3h-56-266
GAGGTGCAGCTGTTGGAGTCTGGGGGAGGCTTGGTACAGCCTGGGGGGTCCCTGCGTCTCTCCTGTGCAGCCTCCGGAT
TCACCTTTCGGGATTATGAGATGTGGTGGGTCCGCCAGGCTCCAGGGAAGGGTCTAGAGCGGGTCTCAGCTATTAATCC
GCAGGGTACGCGTACATACTACGCAGACTCCGTGAAGGGCCGGTTCACCATCTCCCGCGACAATTCCAAGAACACGCTG
TATCTGCAAATGAACAGCCTGCGTGCCGAGGACACCGCGGTATATTACTGTGCGAAACTTCCGTTTTTCTTTCACGAGT
GGGGTCAGGGAACCCTGGTCACCGTCTCGAGC (SEQ ID NO: 1013)
BMS3h-56-267
GAGGTGCAGCTGTTGGAGTCTGGGGGAGGCTTGGTACAGCCTGGGGGGTCCCTGCGTCTCTCCTGTGCAGCCTCCGGAT
TCACCTTTCGGGATTATGAGATGTGGTGGGTCCGCCAGGCTCCAGGGAAGGGTCTAGAGCGGGTCTCAGCTATTAATCC
GCAGGGTACGCGTACATACTACGCAGACTCCGTGAAGGGCCGGTTCACCATCTCCCGCGACAATTCCAAGAACACGCTG
TATCTGCAAATGAACAGCCTGCGTGCCGAGGACACCGCGGTATATTACTGTGCGAAACTTCCGCACTACTTTAAGGACT
GGGGTCAGGGAACCCTGGTCACCGTCTCGAGC (SEQ ID NO: 1014)
BMS3h-56-268
GAGGTGCAGCTGTTGGAGTCTGGGGGAGGCTTGGTACAGTCTGGGGGGTCCCTGCGTCTCTCCTGTGCAGCCTCCGGAT
TCACCTTTCGGGATTATGAGATGTGGTGGGTCCGCCAGGCTCCAGGGAAGGGTCTAGAGCGGGTCTCAGCTATTAATCC
GCAGGGTACGCGTACATACTACGCAGACTCCGTGAAGGGCCGGTTCACCATCTCCCGCGACAATTCCAAGAACACGCTG
TATCTGCAAATGAACAGCCTGCGTGCCGAGGATACCGCGGTATATTACTGTGCGAAACTTCCGTTTTACTTTGAGGAGT
GGGGTCAGGGAACCCTGGTCACCGTCTCGAGC (SEQ ID NO: 1015)
BMS3h-56-269
GAGGTGCAGCTGTTGGAGTCTGGGGGAGGCTTGGTACAGCCTGGGGGGTCCCTGCGTCTCTCCTGTGCAGCCTCCGGAT
TCACCTTTCGGGATTATGAGATGTGGTGGGTCCGCCAGGCTCCAGGGAAGGGTCTAGAGCGGGTCTCAGCTATTAATCC
GCAGGGTACGCGTACATACTACGCAGACTCCGTGAAGGGCCGGTTCACCATCTCCCGCGACAATTCCAAGAACACGCTG
TATCTGCAAATGAACAGCCTGCGTGCCGAGGATACCGCGGTATATTACTGTGCGAAACTTCCGTTTAGGTTTTCCGACC
GGGGTCAGGGAACCCTGGTCACCGTCTCGAGC (SEQ ID NO: 1016)
BMS3h-56-270
GAGGTGCAGCTGTTGGAGTCTGGGGGAGGCTTGGTACAGCCTGGGGGGTCCCTGCGTCTCTCCTGTGCAGCCTCCGGAT
TCACCTTTCGGGATTATGAGATGTGGTGGGTCCGCCAGGCTCCAGGGAAGGGTCTAGAGCGGGTCTCAGCTATTAATCC
GCAGGGTACGCGTACATACTACGCAGACTCCGTGAAGGGCCGGTTCACCATCTCCCGCGACAATTCCAAGAACACGCTG
TATCTGCAAATGAACAGCCTGCGTGCCGAGGACACCGCGGTATATTACTGTGCGAAACTTCCGACGCTGTTTCAGGACT
GGGGTCAGGGAACCCTGGTCACCGTCTCGAGC (SEQ ID NO: 1017)
BMS3h-56-271
GAGGTGCAGCTGTTGGAGTCTGGGGGAGGCTTGGTACAGCCTGGGGGGTCCCTGCGTCTCTCCTGTGCAGCCTCCGGAT
TCACCTTTCGGGATTATGAGATGTGGTGGGTCCGCCAGGCTCCAGGGAAGGGTCTAGAGCGGGTCTCAGCTATTAATCC
GCAGGGTACGCGTACATACTACGCAGACTCCGTGAAGGGCCGGTTCACCATCTCCCGCGACAATTCCAAGAACACGCTG
TATCTGCAAATGAACAGCCTGCGTGCCGAGGACACCGCGGTATATTACTGTGCGAAACTTCCGTTTTACTTTTCCGAGT
GGGGTCAGGGAACCCTGGTCACCGTCTCGAAC (SEQ ID NO: 1018)
BMS3h-56-272
GAGGTGCAGCTGTTGGAGTCTGGGGGAGGCTTGGTACAGCCTGGGGGGTCCCTGCGTCTCTCCTGTGCAGCCTCCGGAT
TCACCTTTCGGGATTATGAGATGTGGTGGGTCCGCCAGGCTCCAGGGAAGGGTCTAGAGCGGGTCTCAGCTATTAATCC
GCAGGGTACGCGTACATACTACGCAGACTCCGTGAAGGGCCGGTTCACCATCTCCCGCGACAATTCCAAGAACACGCTG
TATCTGCAAATGAACAGCCTGCGTGCCGAGGACACCGCGGTATATTACTGTGCGAAACTTCCGTTTTGGTTTCAGGAGT
GGGGTCAGGGAACCCTGGTCACCGTCTCGAGC (SEQ ID NO: 1019)
BMS3h-56-273
GAGGTGCAGCTGTTGGAGTCTGGGGGAGGCTTGGTACAGCCTGGGGGGTCCCTGCGTCTCTCCTGTGCAGCCTCCGGAT
TCACCTTTCGGGATTATGAGATGTGGTGGGTCCGCCAGGCTCCAGGGAAGGGTCTAGAGCGGGTCTCAGCTATTAATCC
GTGGGGTTCGTTGACATACTACGCAGACTCCGTGAAGGGCCGGTTCACCATCTCCCGCGACAATTCCAAGAACACGCTG
TATCTGCAAATGAACAGCCTGCGTGCCGAGGACACCGCGGTATATTACTGTGCGAAACTTCCGTTTTACTTTCAGGAGT
GGGGTCAGGGAACCCTGGTCACCGTCTCGAGC (SEQ ID NO: 1020)
BMS3h-56-274
GAGGTGCAGCTGTTGGAGTCTGGGGGAGGCTTGGTACAGCCTGGGGGGTCCCTGCGTCTCTCCTGTGCAGCCTCCGGAT
TCACCTTTCGGGATTATGAGATGTGGTGGGTCCGCCAGGCTCCAGGGAAGGGTCTAGAGCGGGTCTCAGCTATTAATCC
GTGGGGTTCGTTGACATACTACGCAGACTCCGTGAAGGGCCGGTTCACCATCTCCCGCGACAATTCCAAGAACACGCTG
TATCTGCAAATGAACAGCCTGCGTGCCGAGGATACCGCGGTATATCACTGTGCGAAACTTCCGATGTTCTTTGAGGACT
GGGGTCAGGGAACCCTGGTCACCGTCTCGAAC (SEQ ID NO: 1021)
BMS3h-56-275
GAGGTGCAGCTGTTGGAGTCTGGGGGAGGCTTGGTACAGCCTGGGGGGTCCCTGCGTCTCTCCTGTGCAGCCTCCGGAT
TCACCTTTCGGGATTATGAGATGTGGTGGGTCCGCCAGGCTCCAGGGAAGGGTCTAGAGCGGGTCTCAGCTATTAATCC
GTGGGGTTCGTTGACATACTACGCAGACTCCGTGAAGGGCCGGTTCACCATCTCCCGCGACAATTCCAAGAACACGCTG
TATCTGCAAATGAACAGCCTGCGTGCCGAGGACACCGCGGTATATTACTGTGCGAAACTTCCGTTTTACTTTCACGAGT
GGGGTCAGGGAACCCTGGTCACCGTCTCGAGC (SEQ ID NO: 1022)
BMS3h-56-276
GAGGTGCAGCTGTTGGAGTCTGGGGGAGGCTTGGTACAGCCTGGGGGGTCCCTGCGTCTCTCCTGTGCAGCCTCCGGAT
TCACCTTTCGGGATTATGAGATGTGGTGGGTCCGCCAGGCTCCAGGGAAGGGTCTAGAGCGGGTCTCAGCTATTAATCC
GTGGGGTTCGTTGACATACTACGCAGACTCCGTGAAGGGCCGGTTCACCATCTCCCGCGACAATTCCAAGAACACGCTG
TATCTGCAAATGAACAGCCTGCGTGCCGAGGACACCGCGGTATATTACTGTGCGAAACTTCCGTTTTTCTTTCAGGAGT
GGGGTCAGGGAACCCTGGTCACCGTCTCGAGC (SEQ ID NO: 1023)
BMS3h-56-277
GAGGTGCAGCTGTTGGAGTCTGGGGGAGGCTTGGTACAGCCTGGGGGGTCCCTGCGTCTCTCCTGTGCAGCCTCCGGAT
TCACCTTTCGGGATTATGAGATGTGGTGGGTCCGCCAGGCTCCAGGGAAGGGTCTAGAGCGGGTCTCAGCTATTAATCC
GTGGGGTTCGTTGACATACTACGCAGACTCCGTGAAGGGCCGGTTCACCATCTCCCGCGACAATTCCAAGAACACGCTG
TATCTGCAAATGAACAGCCTGCGTGCCGAGGACACCGCGGTATATTACTGTGCGAAACTTCCGTTTTTCTTTCACGAGT
GGGGTCAGGGAACCCTGGTCACCGTCTCGAGC (SEQ ID NO: 1024)
BMS3h-56-278
GAGGTGCAGCTGTTGGAGTCTGGGGGAGGCTTGGTACAGCCTGGGGGGTCCCTGCGTCTCTCCTGTGCAGCCTCCGGAT
TCACCTTTCGGGATTATGAGATGTGGTGGGTCCGCCAGGCTCCAGGGAAGGGTCTAGAGCGGGTCTCAGCTATTAATCC
GTGGGGTGGGTTCACATACTACGCAGACTCCGTGAAGGGCCGGTTCACCATCTCCCGCGACAATTCCAAGAACACGCTG
TATCTGCAAATGAACAGCCTGCGTGCCGAGGATACCGCGGTATATTACTGTGCGAAACTTCCGTTTTACTTTCAGGAGT
GGGGTCAGGGAACCCTGGTCACCGTCTCGAGC (SEQ ID NO: 1025)
BMS3h-56-279
GAGGTGCAGCTGTTGGAGTCTGGGGGAGGCTTGGTACAGCCTGGGGGGTCCCTGCGTCTCTCCTGTGCAGCCTCCGGAT
TCACCTTTCGGGATTATGAGATGTGGTGGGTCCGCCAGGCTCCAGGGAAGGGTCTAGAGCGGGTCTCAGCTATTAATCC
GTGGGGTGGGTTCACATACTACGCAGACTCCGTGAAGGGCCGGTTCACCATCTCCCGCGACAATTCCAAGAACACGCTG
TATCTGCAAATGAACAGCCTGCGTGCCGAGGATACCGCGGTATATCACTGTGCGAAACTTCCGATGTTCTTTGAGGACT
GGGGTCAGGGAACCCTGGTCACCGTCTCGAAC (SEQ ID NO: 1026)
BMS3h-56-280
GAGGTGCAGCTGTTGGAGTCTGGGGGAGGCTTGGTACAGCCTGGGGGGTCCCTGCGTCTCTCCTGTGCAGCCTCCGGAT
TCACCTTTCGGGATTATGAGATGTGGTGGGTCCGCCAGGCTCCAGGGAAGGGTCTAGAGCGGGTCTCAGCTATTAATCC
GTGGGGTGGGTTCACATACTACGCAGACTCCGTGAAGGGCCGGTTCACCATCTCCCGCGACAATTCCAAGAACACGCTG
TATCTGCAAATGAACAGCCTGCGTGCCGAGGACACCGCGGTATATTACTGTGCGAAACTTCCGTTTTACTTTCACGAGT
GGGGTCAGGGAACCCTGGTCACCGTCTCGAGC (SEQ ID NO: 1027)
BMS3h-56-281
GAGGTGCAGCTGTTGGAGTCTGGGGGAGGCTTGGTACAGCCTGGGGGGTCCCTGCGTCTCTCCTGTGCAGCCTCCGGAT
TCACCTTTCGGGATTATGAGATGTGGTGGGTCCGCCAGGCTCCAGGGAAGGGTCTAGAGCGGGTCTCAGCTATTAATCC
GTGGGGTGGGTTCACATACTACGCAGACTCCGTGAAGGGCCGGTTCACCATCTCCCGCGACAATTCCAAGAACACGCTG
TATCTGCAAATGAACAGCCTGCGTGCCGAGGACACCGCGGTATATTACTGTGCGAAACTTCCGTTTTTCTTTCAGGAGT
GGGGTCAGGGAACCCTGGTCACCGTCTCGAGC (SEQ ID NO: 1028)
BMS3h-56-282
GAGGTGCAGCTGTTGGAGTCTGGGGGAGGCTTGGTACAGCCTGGGGGGTCCCTGCGTCTCTCCTGTGCAGCCTCCGGAT
TCACCTTTCGGGATTATGAGATGTGGTGGGTCCGCCAGGCTCCAGGGAAGGGTCTAGAGCGGGTCTCAGCTATTAATCC
GTGGGGTGGGTTCACATACTACGCAGACTCCGTGAAGGGCCGGTTCACCATCTCCCGCGACAATTCCAAGAACACGCTG
TATCTGCAAATGAACAGCCTGCGTGCCGAGGATACCGCGGTATATTACTGTGCGAAACTTCCGTTTTTCTTTCACGAGT
GGGGTCAGGGAACCCTGGTCACCGTCTCGAGC (SEQ ID NO: 1029)
BMS3h-56-283
GAGGTGCAGCTGTTGGAGTCTGGGGGAGGCTTGGTACAGCCTGGGGGGTCCCTGCGTCTCTCCTGTGCAGCCTCCGGAT
TCACCTTTCGGGATTATGAGATGTGGTGGGTCCGCCAGGCTCCAGGGAAGGGTCTAGAGCGGGTCTCAGCTATTAATCC
GTGGGGTGGGTTGACATACTACGCAGACTCCGTGAAGGGCCGGTTCACCATCTCCCGCGACAATTCCAAGAACACGCTG
TATCTGCAAATGAACAGCCTGCGTGCCGAGGATACCGCGGTATATTACTGTGCGAAACTTCCGTTTTACTTTCAGGAGT
GGGGTCAGGGAACCCTGGTCACCGTCTCGAGC (SEQ ID NO: 1030)
BMS3h-56-284
GAGGTGCAGCTGTTGGAGTCTGGGGGAGGCTTGGTACAGCCTGGGGGGTCCCTGCGTCTCTCCTGTGCAGCCTCCGGAT
TCACCTTTCGGGATTATGAGATGTGGTGGGTCCGCCAGGCTCCAGGGAAGGGTCTAGAGCGGGTCTCAGCTATTAATCC
GTGGGGTGGGTTGACATACTACGCAGACTCCGTGAAGGGCCGGTTCACCATCTCCCGCGACAATTCCAAGAACACGCTG
TATCTGCAAATGAACAGCCTGCGTGCCGAGGATACCGCGGTATATCACTGTGCGAAACTTCCGATGTTCTTTGAGGACT
GGGGTCAGGGAACCCTGGTCACCGTCTCGAAC (SEQ ID NO: 1031)
BMS3h-56-285
GAGGTGCAGCTGTTGGAGTCTGGGGGAGGCTTGGTACAGCCTGGGGGGTCCCTGCGTCTCTCCTGTGCAGCCTCCGGAT
TCACCTTTCGGGATTATGAGATGTGGTGGGTCCGCCAGGCTCCAGGGAAGGGTCTAGAGCGGGTCTCAGCTATTAATCC
GTGGGGTGGGTTGACATACTACGCAGACTCCGTGAAGGGCCGGTTCACCATCTCCCGCGACAATTCCAAGAACACGCTG
TATCTGCAAATGAACAGCCTGCGTGCCGAGGACACCGCGGTATATTACTGTGCGAAACTTCCGTTTTACTTTCACGAGT
GGGGTCAGGGAACCCTGGTCACCGTCTCGAGC (SEQ ID NO: 1032)
BMS3h-56-286
GAGGTGCAGCTGTTGGAGTCTGGGGGAGGCTTGGTACAGCCTGGGGGGTCCCTGCGTCTCTCCTGTGCAGCCTCCGGAT
TCACCTTTCGGGATTATGAGATGTGGTGGGTCCGCCAGGCTCCAGGGAAGGGTCTAGAGCGGGTCTCAGCTATTAATCC
GTGGGGTGGGTTGACATACTACGCAGACTCCGTGAAGGGCCGGTTCACCATCTCCCGCGACAATTCCAAGAACACGCTG
TATCTGCAAATGAACAGCCTGCGTGCCGAGGATACCGCGGTATATTACTGTGCGAAACTTCCGTTTTTCTTTCAGGAGT
GGGGTCAGGGAACCCTGGTCACCGTCTCGAGC (SEQ ID NO: 1033)
BMS3h-56-287
GAGGTGCAGCTGTTGGAGTCTGGGGGAGGCTTGGTACAGCCTGGGGGGTCCCTGCGTCTCTCCTGTGCAGCCTCCGGAT
TCACCTTTCGGGATTATGAGATGTGGTGGGTCCGCCAGGCTCCAGGGAAGGGTCTAGAGCGGGTCTCAGCTATTAATCC
GTGGGGTGGGTTGACATACTACGCAGACTCCGTGAAGGGCCGGTTCACCATCTCCCGCGACAATTCCAAGAACACGCTG
TATCTGCAAATGAACAGCCTGCGTGCCGAGGATACCGCGGTATATTACTGTGCGAAACTTCCGTTTTTCTTTCACGAGT
GGGGTCAGGGAACCCTGGTCACCGTCTCGAGC (SEQ ID NO: 1034)
BMS3h-56-288
GAGGTGCAGCTGTTGGAGTCTGGGGGAGGCTTGGTACAGCCTGGGGGGTCCCTGCGTCTCTCCTGTGCAGCCTCCGGAT
TCACCTTTCGGGATTATGAGATGTGGTGGGTCCGCCAGGCTCCAGGGAAGGGTCTAGAGCGGGTCTCAGCTATTAATCC
GCAGGGTACGCGTACATACTACGCAGACTCCGTGAAGGGCCGGTTCACCATCTCCCGCGACAATTCCAAGAACACGCTG
TATCTGCAAATGAACAGCCTGCGTGCCGAGGACACCGCGGTATATCACTGTGCGAAACTTCCGATGTTCTTTGAGGACT
GGGGTCAGGGAACCCTGGTCACCGTCTCCAGC (SEQ ID NO: 1035)
BMS3h-106-1
GAGGTGCAGCTGTTGGAGACTGGGGGAGGCTTGGTACAGCCTGGGGGGTCCCTGCGTCTCTCCTGTGCAGCCTCCGGAT
TCACCTTTTCGACTTATCATATGCAGTGGGTCCGCCGGGCTCCAGGGAAGGGCCTGGAGTGGGTCTCAATGATTGATGC
GGATGGTCTTGGGACATACTACGCAGACCCCGTGAAGGGCCGGTTCACCATCTCCCGCGACAATTCCAAGAACACGCTG
TATCTGCAAATGAACAGCCTGCGTGCCAAGGACACCGCGGTATATTACTGTGCGAGACCGGGTCCGCAGTTTGGTCAGT
TTGACTACTTGGGTCAGGGAACCCTGGTCACCGTCTCGAGC (SEQ ID NO: 1036)
BMS3h-106-2
GAGGTGCAGCTGTTTGAGTCTGGGGGAGGCTTGGTACAGACTGGGGGGTCCCTGCGTCTCTCCTGTGCAGCCTCCGGAT
TCACCTTTTCGACTTATCATATGCAGTGGGTCCGCCAGGCTCCAGGGAAGGGTCTGGAGTGGGTCTCAATGATTGATGC
GGATGGTCTTGGGAAATACTACGCAGACCCCGTGAAGGGCCGGTTCACCATCTCCCGCGACAATTCCAAGAACACGCTG
TATCTGCAAATGAACAGCCTGCGTGCCGAGGACACCGCGGTATATTACTGTGTGAAACCGGGTCCGCAGTTTGGTCAGT
ATGACTACTGGGGTCAGGGAACCCTGGTCACCGTCTCGAGC (SEQ ID NO: 1037)
BMS3h-107-1
GAGGTGCAGCTGTTGGAGTCAGGGGGAGGCTTGGTACAGCCTGGGGGGTCCCTGCGGCTCTCCTGTTCAGCTTCCGGAT
TCACCTTTTCGGGGTATGATATGCAGTGGGTCCGCCAGGCTCCAGGGAAGGGTCTAGAGTGGGTCTCAACGATTAGTGC
GTCGGGTGTTTATACATACTACGCAGACTCCGTGAAGGGCCGGTTCACCATCTCCCGCGACAATTCCAAGAACACGCTG
TATCTGCAAATGAACAGCCTGCGTGCCGAGGACACCGCGGTATATTACTGTGCGAAATATCCTAATCGTTTTGCGCTTA
ATAGTTTTGACTACAGGGGTCGGGGAACCCTGGTCACCGTCTCGAGC (SEQ ID NO: 1038)
BMS3h-107-2
GAGGTGCAGCTGTTGGAGTCTGGGGGAGGCTTGGTACAGCCTGGGGGGTCCCTGCGTCTCTCCTGTGCAGCTTCCGGAT
TCACCTTTTCGGGGTATGATATGCAGTGGGTCCGCCAGGCTCCAGGGAGGGGTCTAGAGTGGGTCTCAACGATTAGTGC
GTCGGGTGTTTATACATACTACACAGACTCCGTGAAGGGCCGGTTCACCACCTCCCGCGACAATTCCAAGAACACGCTG
TATCTGCAAATGAACAGCCTGCGTGCCGAGGACACCGCGGTATATTACTGTACGAAATATCCAAATCGTTTTGCGCGTA
ATAATTTTGACTACTGGGGTCAGGGAACCCTGGTCACCGTCTCGAGC (SEQ ID NO: 1039)
BMS3h-131-1
GACATCCTGATGACCCAGTCTCCATCCTCCCTGTCTGCATCTGTAGGAGACCGTGTCACCATCACTTGCCGGGCAAATA
GTTCTATTTTGTGGGCGTTAGCTTGGTACCAGCAGAAACCAGGGGAAGCCCCTAAGCTCCTGATCGAGAGTTCTTCCGG
TTTGCAAAGTGGGGTCCCATCACGTTTCAGTGGCAGTGGATCTGGGACAGATTTCACTCTCACCATCAGCAGTCTGCAA
CCTGAAGATTTTGCTACGTACTACTGTGTTCAGAATGCGGTTTGGCCTGGTACGTTCAGCCAAGGGACCAAGGTGGAAA
TCAAACGG (SEQ ID NO: 1040)
BMS3h-131-2
GACATCCAGATGACCCAGTCTCCATCCTCCCTGTCTGCATCTGTAGGAGACCGTGTCACCATCACTTGCCGGGCAGACA
GTTCTATTTTGTGGGCGTTAGCTTGGTACCAGCAGAAACCAGGGAAAGCCCCTAAGCTCCTGATCGAGAGTTCATCCGG
TTTGCAAAGTGGGGTCCCATCACGTTTCAGTGGCAGTGGATCTGGGACAGATTTCACTCTCACCATCAGCAGTCTGCAA
CCTGAAGATTTTGCTACGTACTACTGTGTTCAGAATGCGGTTTGGCCTGGTACGTTCGGCCAAGGGACCAAGGTGGAAA
TCAAACGG (SEQ ID NO: 1041)
BMS3h-131-3
GACATCCAGATGACCGTGTCTCCATCCTCCCTGTCTGCATCTGTAGGAGACCGTGTCACCATCACTTGCCGGGCAGATA
GTTCTATTTTGTGGGCGTTAGCTTGGTACCAGCAGAAACCAGGGAAAGCCCCTAAGCTCCTGATCGAGAGTTCTTCCGG
ATTGCAAAGCGGGGTCCCATCACGTTTCAGTGGCAGTGGATCTGGGACAGATTTCACTCTCACCATCAGCAGTCTGCAA
CCTGAAGATTTTGCTACGTACTACTGTGTTCAGAATGCGGTTTGGCCTGGTACGTTCGGCCAAGGGACCAAGGTGGAAA
TCAAACGG (SEQ ID NO: 1042)
BMS3h-131-4
GACATCCAGATGACCCAGTCTCCATCCTCCCTGTCTGCATCTGTAGGAGACCGTGTCACCATCACTTGCCGGGCAAATA
GTTCTATTTTGTGGGCGTTAGCTTGGTACCAGCAGAAACCAGGGAAAGCCCCTAAGCTCCTGATCGAGAGTTCTTCCGG
TTTGCAAAGTGGGGTCCCATCACGTTTCAGTGGCAGTGGATCTGGGACAGATTTCACTCTCACCATCAGCAGTCTGCAA
CCTGAAGATTTTGCTACGTACTACTGTGTTCAGAATGCGGTTTGGCCTGGTACGTTCGACCAAGGGACCAAGGTGGAAA
TCAAACGG (SEQ ID NO: 1043)
BMS3h-131-5
GACATCCAGATGACCCAGTCTCCATCCTCCCTGTCTGCATCTGTAGGAGACCGTGTCACCATCACTTGCCGGGCAAATA
GTTCTATTTTGTGGGCGTTAGCTTGGTACCAGCAGAAACCAGGGAAAGCCCCTAAGCTCCTGATCGAGAGTTCTACCGG
TTTGCAAAGTGGGGTCCCATCACGTTTCAGTGGCAGTGGATCTGGGACAGATTTCACTCTCACCATCAGCAGTCTGCAA
CCTGAAGATTTTGCTACGTACTACTGTGTTCAGAATGCGGTTTGGCCTGGTACGTTCGGCCAAGGGACCAAGGTGGAAA
TCAAACGG (SEQ ID NO: 1044)
BMS3h-131-6
GACATCCAGATGACCGTGTCTCCATCCTCCCTGTCTGCATCTGTAGGAGACCGTGTCACCATCACTTGCCGGGCAAATA
GTTCTATTTTGTGGGCGTTAGCTTGGTACCAGCAGAAACCAGGGAAAGCCCCTAAGCTCCTGATCGAGAGTTCTTCCGG
ATTGCAAAGCGGGGTCCCATCACGTTTCAGTGGCAGTGGATCTGGGACAGATTTCACTCTCACCATCAGCAGTCTGCAA
CCTGAAGATTTTGCTACGTACTACTGTGTTCAGAATGCGGTTTGGCCTGGTACGTTCGGCCAAGGGACCAAGGTGGAAA
TCAAACGG (SEQ ID NO: 1045)
BMS3h-131-7
GACATCCAGATGACCCAGTCTCCATCCTCCCTGTCTGCATCTGTAGGAGACCGTGTCACCATCACTTGCCGGGCAGATA
GTTCTATTTTGTGGGCGTTAGCTTGGTACCAGCAGAAACCAGGGAAAGCCCCTAAGCTCCTGATCGAGAGTTCTTCCGG
TTTGCAAAGTGGGGTCCCATCACGTTTCAGTGGCAGTGGATCTGGGACAGATTTCACTCTCACCATCAGCAGTCTGCAA
CCTGAAGATTTTGCTACGTACTACTGTGTTCAGAATGCGGTTTGGCCTGGTACGTTCGACCAAGGGACCAAGGTGGAAA
TCAAACGG (SEQ ID NO: 1046)
BMS3h-131-8
GACATCCAGATGACCCAGTCTCCATCCTCACTGTCTGCATCTGTAGGAGACCGTGTCACCATCACTTGCCGGGCAAATA
GTTCTATTTTGTGGGCGTTAGCTTGGTACCAGCAGAAACCAGGGAAAGCCCCTGAGCTCCTGATCGAGAGTTCTTCCGG
TCTGCAAAGTGGGGTCCCATCACGTTTCAGTGGCAGTGGATCTGGGACAGATTTCACTCTCACCATCAGCAGTCTGCAA
CCTGAAGATTTTGCTACGTACTACTGTGTTCAGAATGCGGTTTGGCCTGGTACGTTCGGCCAAGGGACCAAGGTGGAAA
TCAAACGG (SEQ ID NO: 1047)
BMS3h-131-9
GACATCCAGATGACCCAGTCTCCATCCTCCCTGTCTGCATCTGTAGGAGACCGTGTCACCATCACTTGCCGGGCGAATA
GTTCTATATTGTGGGCGTTGGCTTGGTACCAGCAGAAACCAGGGAAAGCCCCTAAGCTCCTGATCGAGAGTTCTTCCGG
TTTGCAAAGTGGGGTCCCATCACGTTTCAGTGGCAGTGGATCTGGGACAGATTTCACTCTCACCATCAGCAGTCTGCAA
CCTGAAGATTTTGCTACGTACTACTGTGTTCAGAATGCGGTTTGGCCTGGTACGTTCGGCCAAGGGACCAAGGTGGAAA
ACAAACGG (SEQ ID NO: 1048)
BMS3h-131-10
GACATCCAGATGACCCAGTCTCCATCCTCCCTGTCTGCATCTGTAGGAGACCGTGTCACCATCACTTGCCGGGCAAATA
GTTCTATTCTGTGGGCGTTAGCTTGGTACCAGCAGAAACCTGGGAAAGCCCCTAAGCTCCTGATCGAGAGTTCTTCCGG
TTTGCAAAGTGGGGTCCCATCACGTTTCAGTGGCAGTGGATCTGGGACAGATTTCACTCTCACCATCAGCAGTCTGCAA
CCCGAAGATTTTGCTACGTACTACTGTGTTCAGAATGCGGTTTGGCCTGGTACGTTCGGCCAAGGGACCAAGGTGGAAA
TCAAACGG (SEQ ID NO: 1049)
BMS3h-131-11
GACATCCAGATGACCCAGTCTCCATCCTCCCTGTCTGCTTCTGTAGGAGACCGTGTCACCATCACTTGCCGGGCAAATA
GTTCTATTTTGTGGGCGTTAGCTTGGTACCAGCAGAAACCAGGGAAAGCCCCTAAGCTCCTGATCGAGAGTTCTTCCGG
TTTGCAAAGTGGGATCCCATCACGTTTCAGTGGCAGTGGATCTGGGACAGATTTCACTCTCACCATCAGCAGTCTGCAA
CCTGAAGATTTTGCTACGTACTACTGTGTTCAGAATGCGGTTTGGCCTGGTACGTTCGGCCAAGGGACCAAGGTGGAAA
TCAAACGG (SEQ ID NO: 1050)
BMS3h-131-12
GACATCCAGATGACCCAGTCTCCATCCTCCCTGTCTGCATCTGTTGGAGACCGTGTCACCATCACTTGCCGGGCAAATA
GTTCTATTTTGTGGGCGTTAGCTTGGTACCAGCAGAAACCAGGGAAAGCCCCTAAGCTCCTGATCGAGAGTTCTTCCGG
ATTGCAAAGCGGGGTCCCATCACGTTTCAGTGGCAGTGGATCTGGGACAGATTTCACTCTCACCATCAGCAGTCTGCAA
CCTGAAGATTTTGCTACGTACTACTGTGTTCAGAATGCGGTTTGGCCTGGTACGTTCGGCCAAGGGACCAAGGTGGAAA
TCAAACGG (SEQ ID NO: 1051)
BMS3h-131-13
GACATCCTGTTGACCCAGTCTCCATCCTCCCTGTCTGCATCTGTAGGAGACCGTGTCACCATCACTTGCCGGGCAAATA
GTTCTATTTTGTGGGCGTTAGCTTGGTACCAGCAGAAACCAGGGAAAGCCCCTAAGCTCCTGATCGAGAGTTCTTCCGG
TTTGCAAAGTGGGGTCCCATCACGTTTCAGTGGCAGTGGATCTGGGACAGATTTCACTCTCACCATCAGCAGTCTGCAA
CCTGAAGATTTTGCTACGTACTACTGTGTTCAGAATGCGGTTTGGCCTGGTACGTTCGGCCAAGGGACCAAGGTGGAAA
TCAAACGG (SEQ ID NO: 1052)
BMS3h-131-14
GACATCCAGATGACCCAGTCTCCATCCTCCCTGTCTGCATCTGTAGGAGACCGTGTCACCATCACTTGCCGGGCAAATA
GTTCTATTTTGTGGGCGTTAGCTTGGTACCAGCAGAAACCAGGGAAAGCCCCTAAGCTCCTGATCGAGAGTTCTTCCGG
TTTGCAAAGTGGGGTCCCATCACGTTTCAGTGGAAGTGGAACTGGGACAGATTTCACTCTCACCATCAGCGGTCTGCAA
CCTGAAGATTTTGCTACGTACTACTGTGTTCAGAATGCGGTTTGGCCTGGTACGTTCGACCAAGGGACCAAGGTGGAAA
TCAAACGG (SEQ ID NO: 1053)
BMS3h-131-15
GACATCCAGATGACCCAGTCTCCATCCTCCCTGTCTGCATCTGTAGGAGACCGTGTCACCATCCCTTGCCGGGCAAATA
GTTCTATTTTGTGGGCGTTAGCTTGGTACCAGCAGAAACCAGGGAAAGCCCCTAAGCTCCTGATCGAGAGTTCTTCCGG
TTTGCAAAGTGGGGTCCCATCACGTTTCAGTGGCAGTGCATCTGGGACAGATTTCACTCTCACCATCAGCAGTCTGCAA
CCTGAAGATTTTGCTACGTACTACTGTGTTCAGAATGCGGTTTGGCCTGGTACGTTCGGCCAAGGGACCAAGGTGGAGA
TCAAACGG (SEQ ID NO: 1054)
BMS3h-193-1
GACATCCAGATGGCCCAGTCTCCATCCTCCCTGTCTGCATCTGTAGGAGACCGTGTCACCATCACTTGCCGGGCAAGTC
AGACGATTGAGCGTCGTTTAAATTGGTATCAGCAGAAACCAGGGAAAGCCCCTAAGCTCCTGATCTATCTTGCTTCCCG
TTTGCAAAGTGGGGTCCCATCACGTTTCAGTGGCAGTGGATCTGGGACAGATTTCACTCTCACCATCAGCAGTCTGCAA
CCTGAAGATTTTGCTACGTACTACTGTCATCAGTATGCGAGTCCACCTTTGACGTTAGGCCAAGGGACCAAAGTGGAAA
TCAAACGG (SEQ ID NO: 1055)
BMS3h-193-2
GACATCCAGATGACCCAGTCTCCATCCTCCCTGTCTGCATCTGTAGGAGACAGTGTCACCATCACTTGCCGGGCAAGTC
AGACGATTGAGCGTCGTTTAAATTGGTATCAGCAGAAACCAGGGGAAGCCCCTAAGCTCCTGATCTATCTTGCTTCCCG
TTTGCAAAGTGGGGTCCCATCACGTTTCAGTGGCAGTGGATCTGGGACAGATTTCACTCTCACCATCAGCAGTCTGCAA
CCTGAAGATTTTGCTACGTACTACTGCCATCAGTATGCGAGTCCACCTTTGACGTTCGGCCAAGGGACCAATGTGGAAA
TCAAACGG (SEQ ID NO: 1056)
BMS3h-193-3
GACATCCAGATGACCCAGTCTCCATCCTCCCTATCTGCATCTGTAGGAGACCGTGTCACCATCACTTGCCGGGCAAGTC
AGACGATTGAGCGTCGTTTAAATTGGTATCAGCAGAAACCAGGGAAAGCCCCTAAGCTCCTGATCTATCTTGCTTCCCG
TTTGCAAAGTGGGGTCCCATCACGTTTCAGTGGCAGTGGATCTGGGACAGATTTCACTCTCACCATCAGCAGTCTGCAA
CCTGAAGATTTTGCTGCGTACTACTGTCATCAGTACGAGAGTCCACCTTTGACGTTTGGCCAAGGGACCAAAGTGGAAA
TCAAACGG (SEQ ID NO: 1057)
BMS3h-193-4
GACATCCAGATGACCCAGTCTCCATCCTCCCTGTCTGCATCTGTAGGAGACCGTGTCACCATCACTTGCCGGGCAAGTC
GGACGATTGAGCGTCGTTTAAATTGGTATCAGCAGAAACCAGGGAAAGCCCCTAAGCTCCTGATCTATCTTGCTTCGCG
TTTGCAAAGTGGGGTCCCATCACGTTTCAGTGGCAGTGGATCTGGGACAGATTTCACTCTCACCATCAGCAGTCTGCAA
CCTGAAGATTTTGCTACGTACTACTGTCATCAGTATGAGAGTCCACCTTTGACGTTCGGCCAAGGGACCAAAGTGGAAA
TCAAACGG (SEQ ID NO: 1058)
BMS3h-193-5
GACATCCAGATGACCCAGTCTCCATCCTCCCTGTCTGCATCTGTAGGAGAACGTGTCACCATCACTTGCCGGGCAAGTC
AGACGATTGAGCGTCGTTTAAATTGGTATCAGCAGAAACCAGGGAAAGCCCCTAAGCTCCTGATCTATCTTGCTTCCCG
TTTGCAAAGTGGGGTCCCATCACGTTTCAGTGGCAGTGGATCTGGGACAGATTTCACTCTCACCATCAGCAATCTGCAA
CCTGAAGATTCTGCTACGTACTACTGTCATCAGTATGCGAGTCCACCTTTGACGTTAGGCCAAGGGACCAAAGTGGAAA
TCAAACGG (SEQ ID NO: 1059)
BMS3h-193-6
GACATCCAGATGACCCAGTCTCCATCCTCCCTGTCTGCATCTGTAGGAGACCGTGTCACCATCACTTGCCGGGCAAGCC
AGACGATTGAGCGTCGTTTAAATTGGTATCAGCAGAAACCAGGGAAGGCCCCTAAGCTCCTGATCTATCTTGCTTCCCG
TTTGCAAAGTGGGGTCCCATCACGTTTCAGTGGCAGTGGATCTGGGACAGATTTCACTCTCACCATCAGCAGTCTGCAA
CCTGAAGATTTTGCTACGTACTACTGTCATCAGTATGCGAGTCCACCTTTGACGTTAGGCCAAGGGACCAAAGTGGAAA
TCAAACGG (SEQ ID NO: 1060)
BMS3h-193-7
GACATCCAGATAACCCAGTCTCCATCCTCCCTGTCTGCATCTGTAGGAGACCGTGTCACCATCACTTGCCGGGCAAGTC
AGACGATTGAGCGTCGTTTAAATTGGTATCAGCAGAAACCAGGGAAAGACCCTAAGCTCCTGATCTATCTTGCTTCCCG
TTTGCAAAGTGGGGTCCCATCACGTTTCAGTGGCAGTGGATCTGGGACAGATTTCACTCTCACCATCAGCAGTCTGCAA
CCTGAAGATTTTGCTACGTACTACTGTCATCAGTATGAGAGTCCTCCTTTGACGTTCGGCCAAGGGACCAAAGTGGAAA
TCAAACGG (SEQ ID NO: 1061)
BMS3h-193-8
GACATCCAGATGACCCAGTCTCCATCCTCCCTGTCTGCATCTGTAGGAGACCGTGTCACCATCACTTGCCGGGCAAGTC
AGACGATTGAGCGTCGTTTAAATTGGTATCAGCAGAAACCAGGGGAAGCCCCTAAGCTCCTGATCTATCTTGCTTCCCG
TTTGCAAAGTGGGGTCCCATCACGTTTCAGTGGCAGTGGATCTGGGACAGATTTCACTCTCACCATCAGCAGTCTGCAA
CCTGAAGATTTTGCTACGTACTACTGTCATCAGTATGAGAGTCCACCTTTGACGTTCGGCCAAGGGACCAAAGTGGAAA
TCAAATGG (SEQ ID NO: 1062)
BMS3h-193-9
GACATCCAGTTGACCCAGTCTCCATCCTCCCTGTCTGCATCTGTAGGAGACCGAGTCACCATCACTTGCCGGGCAAGTC
AGACGATTGAGCGTCGTTTAAATTGGTATCAGCAGAAACCAGGGAAAGCCCCTAAGCTCCTGATCTATCTTGCTTCCCG
TTTGCAAAGTGGGGTCCCATCACGTTTCAGTGGCAGTGGATCTGGGACAGAATTCACTCTCACCATCAGCAGTCTGCAA
CCTGAAGATTTTGCTACGTACTACTGTCATCAGTATGAGAGTCCACCTTTGACGTTCGGCCAAGGGACCAAAGTGGAAA
TCAAACGG (SEQ ID NO: 1063)
BMS3h-193-10
GACATCCAGATGTCCCAGTCTCCATCCACCCTGTCTGCATCTGTAGGAGACCGTGTCACCATCACTTGCCGGGCAAGTC
AGACGATTGAGCGTCGTTTAAATTGGTATCAGCAGAAACCAGGGAAAGCCCCTAAGCTCCTGATCTATCTTGCTTCCCG
CTTGCAAAGTGGGGTCCCATCACGTTTCAGTGGCAGTGGATCTGGGACAGATTTCACTCTCACCATCAGCAGTCTGCAA
CCTGAAGATTTTGCTACGTACTACTGTCATCAGTATGAGAGTCCACCTTTGATGTTCGGCCAAGGGACCAAAGTGGAAA
TCAAACGG (SEQ ID NO: 1064)
BMS3h-193-11
GACATCCAGATGACCCAGTCTCCATCCTCCCTGTCTGCATCTGTAGGAGACCGTGTCACCATTACTTGCCGGGCAAGTC
AGACGATTGAGCGTCGTTTAAATTGGTATCAGCAGAAACCAGGGAAAGACCCTAAGCTCCTGATCTATCTTGCTTCCCG
TTTGCAAAGTGGGGTCCCATCACGTTTCAGTGGCAGTGGATCTGGGACAGATTTCACTCTCACCATCAGCAGTCTGCAA
CCAGAAGATTTTGCTACGTACTACTGTCATCAGTATGAGAGTCCACCTTTGACGTTCGGCCAAGGGACCAAAGTGGAAA
TCAAACGG (SEQ ID NO: 1065)
BMS3h-193-12
GACATCCAGATGACCCAGTCTCCATCCTCCCTGTCTGCATCCGTAGGAGACCGTGTCACCATCACTTGCCGGGCAAGTC
AGACGATTGAGCGTCGTTTAAACTGGTATCAGCAGAAACCAGGGAAAGCCCCTAAGCTCCTGATCTATCTTGCTTCCCG
TTTGCAAAGTGGGGTCCCATCACGTTTCAGTGGCAGTGGATCTGGGACAGATTTCACTCTCACCATCAGCAGTCTGCAA
CCTGAAGATTTTGCTACGTACTACTGTCATCAGTATGAGAGTCCACCTTTGACGTTCGGCCAAGGGACCAAAGTGGAAA
TCAAACGG (SEQ ID NO: 1066)
BMS3h-193-13
GACATCCAGATGACCCAGTCTCCATCCTCCCTGTTTGCATCTGTAGGGGACCGTGTCACCATCACTTGCCGGGCAAGTC
AGACGATTGAGCGTCGTTTAAATTGGTATCAGCAGAAACCAGGGAAAGCCCCTAAGCTCCTGATCTATCTTGCTTCCCG
TTTGCAAAGTGGGGTCCCATCACGTTTCAGTGGCAGTGGATCTGGGACAGATTTCACTCTCACCATCAGCAGTCTGCAA
CCTGAAGATTTTGCTACGTACTACTGTCATCAGTATGAGAGTCCACCTTTGACGTTCGGCCAAGGGACCAAAGTGGAAA
TCAAACGG (SEQ ID NO: 1067)
BMS3h-193-14
GACATCCAGATGACCCAGTATCCATCCTCCCTGTCTGCATCTGTAGGAGACCGTGTCACCATCACTTGCCGGGCAAGTC
AGTCGATTGAGCGTCGTTTAAATTGGTATCAGCAGAAACCAGGGGAAGCCCCTAAGCTCCTGATCTATCTTGCTTCCCG
TTTGCAAAGTGGGGTCCCATCACGTTTCAGTGGCAGTGGATCTGGGACAGATTTCACTCTCACCATCAGCAGTCTGCAA
CCTGAAGATTTTGCTACGTACTACTGTCATCAGTATGAGAGTCCACCTTTGACGTTCGGCCAAGGGACTAAAGTGGAAA
TCAAACGG (SEQ ID NO: 1068)
BMS3h-193-15
GACATCCAGATGACCCAGTCTCCATCCTCCCTGTCTGCATCTGTAGGAGACCGTGTCACCATCACTTGCCGGGCAAGTC
GGACGATTGAGCGTCGTTTAAATTGGTATCAGCAGAAACCAGGGAAAGCCCCTAAGCTCCTGATCTATCTTGCTTCGCG
TTTGCAAAGTGGGGTCCCATCACGTTTCAGTGGCAGTGGATCTGGGACAGATTTCACTCTCACCATCAGCAGTCTGCAA
CCTGAAGATTTTGCTACGTACTACTGTCATCCGTATGAGAGTCCACCTTTGACGTTCGGCCAAGGGACCAAAGTGGAAA
TCAAACGG (SEQ ID NO: 1069)
BMS3h-193-16
GACATCCAGATGACCCAGTCTCCATCCTCCCTGTCTGCATCTGTAGGAGACCGTGTCACCATCACTTGCCGGGCAAGTC
AGGCGATTGAGCGTCGTTTAAATTGGTATCAGCAGAAACCAGGGAAAGCCCCTAAGCTCCTGATCTATCTTGCTTCCCG
TTTGCAAAGTGGGGTCCCATCTCGTTTCAGTGGCAGTGGATCTGGGACAGATTTCACTCTCACCATCAGCAGTCTGCAG
CCAGAAGATTTTGCTACGTACTACTGTCATCAGTATGCGAGTCCACCTTTGACGCTCGGCCAAGGGACCAAAGTGGAAA
TCAAACGG (SEQ ID NO: 1070)
BMS3h-193-17
AACATCCAGATGACCCAGTCTCCATCCTCCCTGTCTGCATCTGTAGGAGACCGTGTCACCATCACTTGCCGGGCAAGTC
AGGCGATTGAGCGTCGTTTAAATTGGTATCAGCAGAAACCAGGGAAAGCCCCTAAGCTCCTGATCTATCTTGCTTCTCG
TTTGCAAAGTGGGGTCCCATCACGTTTCAGTGGCAGTGGATCTGGGACAGATTTCACTCTCACCATCAGCAGTCTGCAA
CCTGAAGATTTTGCTACGTACTACTGTCATCAGTATGAGAGTCCACCTTTGACGTTCGGCCAAGGGACCAAAGTGGAAA
TCAAACGG (SEQ ID NO: 1071)
BMS3h-193-18
GACATCCAGATGACCCAGTCTCCATCCTCCCTGTCTGCATCTGTAGGAGACCGTGTCACCATCACTTGCCGGGCAAGTC
AGACGATTGGGCGTCGTTTAAATTGGTATCAGCAGAAACCAGGGAAAGCCCCTAAGCTCCTGATCTATCTTGCTTCCCG
TTTGCAAAGTGGGGTCCCATCACGTTTCAGTGGCAGTGGATCTGGGTCAGATTTCACTCTCACCATCAGCAGTCTGCAA
CCTGAAGATTTTGCTACGTACTACTGTCATCAGTATGAGAGTCCACCTTTGACGTTCGGCCAAGGGACCAAAGTGGAAA
TCAAACGG (SEQ ID NO: 1072)
BMS3h-193-19
GACATCCAGATGACCCAGTCTCCATCCTCCCTTTCTGCATCTGTAGGAGACCGTGTCACCATCACTTGCCGAGCAAGTC
AGACGATTGAGCGTCGTTTAAATTGGTATCAGCAGAAACCAGGGAAAGCCCCTAAGCTCCTGATCTATCTTGCTTCCCG
TTTGCAAAGTGGGGTCCCATCACGTTTCAGTGGCAGTGGATCTGGGACAGAATTTACTCTCACCATCAGCAGTCTGCAA
CCTGAAGATTTTGCTACGTACTACTGTCATCAGTATGAGAGTCCACCTTTGACGTTCGGCCAAGGGACCAAAGTGGAAA
TCAAACGG (SEQ ID NO: 1073)
BMS3h-193-20
GACATCCAGATGACCCAGACTCCATCCTCCCTGTCTGCATCTGTAGGAGACCGTGTCACCATCACTTGCCGGGCAAGTC
AGACGATTGAGCGTCGTTTAAATTGGTATCAGCAGAAACCAGGGGAAGCCCCTAAGCTCCTGATCTATCTTGCTTCCCG
TTTGCAAAGTGGGGTCCCATCACGTTTCAGTGGCAGTGGATCTGGGACAGATTTCACTCTCACCATCAGCAGTCTGCAA
CCTGAAGATTTTGCCACGTACTACTGTCATCAGTATGAGAGTCCACCTTTGACGTTCGGCCAAGGGACCAAAGTGAAAA
TCAAACGG (SEQ ID NO: 1074)
BMS3h-193-21
GACATCCAGATGACCCAGTCTCCATCCTCCCTGTCTGCATCTGTAGGAGACAGTGTCACCATCACTTGCCGGGCAAGTC
AGACGATTGAGCGTCGTTTAAATTGGTATCAGCAGAAACCAGGGAAAGCCCCTAAGCTCCTGATCTATCTTGCTTCCCG
TTTGCAAAGTGGGGTCCCATCACGTTTCAGTGGCAGTGGATCTGGGACAGATTTCACTCTCACCATCAGCAGTCTGCAA
CCCGAAGATTTTGCTACGTACTACTGTCATCAGTATGAGAGTCCACCTTTGACGTTCGGCCAAGGGACCAAAGTGGAAA
TCAAACGG (SEQ ID NO: 1075)
BMS3h-193-22
CACATCCAGATGACCCAGTCTCCATCCTCCCTGTCTGCATCTGTAGGAGACCGTGTCACCATCACTTGCCGGGCAAGTC
AGACGATTGAGCGTCGTTTAAATTGGTATCAGCAGAAACCAGGGAAAGCCCCTAAGCTCCTGATCTATCTTGCTTCCCG
TTTGCAAAGTGGGGTCCCATCACGTTTCAGTGGCAGTGGATCTGGGACAGATTTCACTCTCACCATCAGCAGTCTGCAA
CCTGAAGATTTTGCTACGTACTACTGCCATCAGTATGAGAGTCCACCTTTGACGTTCGGCCAAGGGACCAAAGTGGAAA
TCAAACGG (SEQ ID NO: 1076)
BMS3h-193-23
GACGTCCAGATGACCCAGTCTCCATCCTCCCTGTCTGCATCTGTAGGAGACCGTGTCACCATCACTTGCCGGGCAAGTC
AGACGATTGAGCGTCGTTTAAATTGGTATCAGCAGAAACCAGGGGAAGCCCCTAAGCTCCTGATCTATCTTACTTCCCG
TTTGCAAAGCGGGGTCCCATCACGTTTCAGTGGTAGTGGATCTGGGACAGATTTCACTCTCACCATCAGCAGTCTGCAA
CCTGAAGATTTTGCTACGTACTACTGCCATCAGTATGCGAGTCCACCTTTGACGTTCGGCCAAGGGACCAAGGTGGAAA
TCAAACGG (SEQ ID NO: 1077)
BMS3h-193-24
GACATCCAGATGACCCAGTCGCCATCCTCCCTGTCTGCATCTGTAGGAGACCGTGTCACCATCACTTGCCGGGCAAGTC
AGACGATTGAGCGTCGTTTAAATTGGTATCAGCAGAAACCAGGGAAAGCCCCTAAGCTCCTGATCTATCTTGCTTCCCG
TTTGCAAAGTGGGGTCCCATCACGTTTCAGTGGCAGTGGATCTGGGACAGATTTCACTCTCACCATCAGCAGTCTGCAA
CCTGAAGATTTTGCTACGTACTACTGTCACCAGTATGAGAGTCCACCTTTGACGTTCGGCCAAGGGACCAAAGTGGTAA
TCAAACGG (SEQ ID NO: 1078)
BMS3h-193-25
GACATCCAGATGACCCAGTCTCCATCCTCCCTGTCTGCATCTGTAGGAGACCGAGTCACCATCACTTGCCGGGCAAGTC
AGACGATTGAGCGTCGTTTAAATTGGTATCAGCAGAAACCTGGGAAAGCCCCTAGGCTCCTGATCTATCTTGCTACCCG
TTTGCAAAGTGGGGTCCCATCACGCTTCAGTGGCAGTGGATCTGGGACAGATTTCACTCTCACCATCAGCAGTCTGCAA
CCTGAAGATTTTGCTACGTACTACTGTCATCAGTATGAGAGTCCACCTTTGACGTTCGGCCAAGGGACCAAAGTGGAAA
TCAAACGG (SEQ ID NO: 1079)
BMS3h-193-26
GACATCCAGATGACCCAGTCTCCATCCTCCCTGTCTGCATCTGTAGGAGACCGTGTCACCATCACTTGCCGGGCAAGTC
AGCCGATTGAGCGTCGTTTAAATTGGTATCAGCAGAAGCCAGGGAAAGCCCCTAAGCTCCTGATCTATCTTGCTTCCCG
TTTGCAAAGTGGGGTCCCATCACGTTTCAGTGGCAGTGGATCTGGGACAGATTTCACTCTCACCATCAGCAGTCTGCAA
CCTGAAGATTTTGCTACATACTACTGTCATCAGTATGAGAGTCCACCTTTGACGTTCGGCCAAGGGACCAAAGTGGAAA
TCAAACGG (SEQ ID NO: 1080)
BMS3h-193-27
GACATCCAGATGACCCAGTCTCCATCCTCCCTGTCTGCATCTGTAGGAGACCGTGTCACCATCACTTGCCGGGCAAGTC
AGACGATTGGGCGTCGTTTAAATTGGTATCAGCAGAAACCAGGGAAAGCCCCTAAGCTCCTGATCTATCTTGCTTCCCG
TTTGCAAAGTGGGGTCCCATCACGTTTCAGTGGCAGTGGATCTGGGACAGATTTCACTCTCACCATCAGCAGTCTGCAA
CCTGAAGATTTTGCTACGTACTACTGTCATCAGTATGAGAGTCCACCTTTGACGTTCGGCCAAGGGACCAAAGTGGAAA
TCAAACGG (SEQ ID NO: 1081)
BMS3h-193-28
GACATCCAGATGACCCAGTCTCCATCCTCCCTGTCTGCATCTGTAGGAGACCGTGTCACCATCACTTGCCGGGCAAGTC
AGTCGATTGAGCGCCGTTTAAATTGGTATCAGCAGAAACCAGGGAAAGCCCCTAAGCTCCTGATCTATCTTGCTTCCCG
TTTGCAAAGTGGGGTCCCATCACGTTTCAGTGGCAGTGGATCTGGGACAGATTTCACTCTCACCATCAGCAGTCTGCAA
CCTGAAGATTTTGCTACGTACTACTGTCATCAGTATGAGAGTCCTCCTTTGACGTTCGGCCAAGGGACCAAAGTGGAAA
TCATACGG (SEQ ID NO: 1082)
BMS3h-193-29
GACATCCAGATGACCCAGTCTCCATCCTCCCTGTCTGCATCTGTAGGAGACCGAGTCACCATCACTTGCCGGGCAAGTC
AGACGATTGAGCGTCGTTTAAATTGGTATCAGCAGAAACCTGGGAAAGCCCCTAAGCTCCTGATCTATCTTGCTACCCG
TTTGCAAAGTGGGGTCCCATCACGCTTCAGTGGCAGTGGATCTGGGACAGATTTCACTCTCACCATCAGCAGTCTGCAA
CCTGAAGATTTTGCTACGTACTACTGTCATCAGTATGAGAGTCCACCTTTGACGTTCGGCCAAGGGACCAAAGTGGAAA
TCAAACGG (SEQ ID NO: 1083)
BMS3h-193-30
GACATCCAGATGACCCAGTCTCCATCCTCCCTGTCTGCATCTGTAGGAGACCGTGTCACCATCACTTGCCGGGCAAGTC
AGTCGATTGAGCGCCGTTTAAATTGGTATCAGCAGAAACCAGGGAAAGCCCCTAAGCTCCTGATCTATCTTGCTTCCCG
TTTGCAAAGTGGGGTCCCATCACGTTTCAGTGGCAGTGGATCTGGGACAGATTTCACTCTCACCATCAGCAGTCTGCAA
CCTGAAGATTTTGCTACGTACTACTGTCATCAGTATGAGAGTCCTCCTTTGACGTTCGGCCAAGGGACCAAAGTGGAAA
TCAAACGG (SEQ ID NO: 1084)
BMS3h-193-2501
GACATCCAGATGACCCAGTCTCCATCCTCCCTGTCTGCATCTGTAGGAGACCGAGTCACCATCACTTGCCGGGCAAGTC
AGACGATTGAGCGTCGTTTAAATTGGTATCAGCAGAAACCTGGGAAAGCCCCTAGGCTCCTGATCTATCTTGCTACCCG
TTTGCAAAGTGGGGTCCCATCACGCTTCAGTGGCAGTGGATCTGGGACAGATTTCACTCTCACCATCAGCAGTCTGCAA
CCTGAAGATTTTGCTACGTACTACTGTCATCAGTTCGAGCACCCACCTTTGACGTTCGGCCAAGGGACCAAAGTGGAAA
TCAAACGG (SEQ ID NO: 1085)
BMS3h-193-2502
GACATCCAGATGACCCAGTCTCCATCCTCCCTGTCTGCATCTGTAGGAGACCGAGTCACCATCACTTGCCGGGCAAGTT
TCCCCATTGACCGTCGTTTAAATTGGTATCAGCAGAAACCTGGGAAAGCCCCTAGGCTCCTGATCTATCTTGCTACCCG
TTTGCAAAGTGGGGTCCCATCACGCTTCAGTGGCAGTGGATCTGGGACAGATTTCACTCTCACCATCAGCAGTCTGCAA
CCTGAAGATTTTGCTACGTACTACTGTCATCAGTATGAGAGTCCACCTTTGACGTTCGGCCAAGGGACCAAAGTGGAAA
TCAAACGG (SEQ ID NO: 1086)
BMS3h-193-2503
GACATCCAGATGACCCAGTCTCCATCCTCCCTGTCTGCATCTGTAGGAGACCGAGTCACCATCACTTGCCGGGCAAGTT
CCACCATTGGCCGTCGTTTAAATTGGTATCAGCAGAAACCTGGGAAAGCCCCTAGGCTCCTGATCTATCTTGCTACCCG
TTTGCAAAGTGGGGTCCCATCACGCTTCAGTGGCAGTGGATCTGGGACAGATTTCACTCTCACCATCAGCAGTCTGCAA
CCTGAAGATTTTGCTACGTACTACTGTCATCAGTATGAGAGTCCACCTTTGACGTTCGGCCAAGGGACCAAAGTGGAAA
TCAAACGG (SEQ ID NO: 1087)
BMS3h-193-2504
GACATCCAGATGACCCAGTCTCCATCCTCCCTGTCTGCATCTGTAGGAGACCGAGTTACCATCACTTGCCGGGCAAGTT
CCCAGATTGGGCGTCGTTTAAATTGGTACCAGCAGAAACCAGGGAAAGCCCCTAGGCTCCTGATCTATCTTGCTACCCG
TTTGCAAAGTGGGGTCCCATCACGCTTCAGTGGCAGTGGATCTGGGACAGATTTCACTCTCACCATCAGCAGTCTGCAA
CCTGAAGATTTTGCTACGTACTACTGTCATCAGTATGAGAGTCCACCTTTGACGTTCGGCCAAGGGACCAAAGTGGAAA
TCAAACGG (SEQ ID NO: 1088)
BMS3h-193-2505
GACATCCAGATGACCCAGTCTCCATCCTCCCTGTCTGCATCTGTAGGAGACCGAGTCACCATCACTTGCCGGGCAAGTG
AGCGGATTGGGCGTCGTTTAAATTGGTATCAGCAGAAACCAGGGAAAGCCCCTAGGCTCCTGATCTATCTTGCTACCCG
TTTGCAAAGTGGGGTCCCATCACGCTTCAGTGGCAGTGGATCTGGGACAGATTTCACTCTCACCATCAGCAGTCTGCAA
CCTGAAGATTTTGCTACGTACTACTGTCATCAGTATGAGAGTCCACCTTTGACGTTCGGCCAAGGGACCAAAGTGGAAA
TCAAACGG (SEQ ID NO: 1089)
BMS3h-193-2506
GACATCCAGATGACCCAGTCTCCATCCTCCCTGTCTGCATCTGTAGGAGACCGAGTCACCATCACTTGCCGGGCAAGTC
AGCAGATTGGCCGCCGTTTAAATTGGTATCAGCAGAAACCTGGGAAAGCCCCTAGGCTCCTGATCTATCTTGCTACCCG
TTTGCAAAGTGGGGTCCCATCACGCTTCAGTGGCAGTGGATCTGGGACAGATTTCACTCTCACCATCAGCAGTCTGCAA
CCTGAAGATTTTGCTACGTACTACTGTCATCAGTATGAGAGTCCACCTTTGACGTTCGGCCAAGGGACCAAAGTGGAAA
TCAAACGG (SEQ ID NO: 1090)
BMS3h-193-2507
GACATCCAGATGACCCAGTCTCCATCCTCCCTGTCTGCATCTGTAGGAGACCGAGTCACCATCACTTGCCGGGCAAGTC
AGCCGATTGCCCGGCGTTTAAATTGGTACCAGCAGAAACCAGGGAAAGCCCCTAGGCTCCTGATCTATCTTGCTACCCG
TTTGCAAAGTGGGGTCCCATCACGCTTCAGTGGCAGTGGATCTGGGACAGATTTCACTCTCACCATCAGCAGTCTGCAA
CCTGAAGATTTTGCTACGTACTACTGTCATCAGTATGAGAGTCCACCTTTGACGTTCGGCCAAGGGACCAAAGTGGAAA
TCAAACGG (SEQ ID NO: 1091)
BMS3h-193-2508
GACATCCAGATGACCCAGTCTCCATCCTCCCTGTCTGCATCTGTAGGAGACCGAGTCACCATCACTTGCCGGGCAAGTG
GGAACATTGGCCGTCGTTTAAATTGGTACCAGCAGAAACCAGGGAAAGCCCCTAGGCTCCTGATCTATCTTGCTACCCG
TTTGCAAAGTGGGGTCCCATCACGCTTCAGTGGCAGTGGATCTGGGACAGATTTCACTCTCACCATCAGCAGTCTGCAA
CCTGAAGATTTTGCTACGTACTACTGTCATCAGTATGAGAGTCCACCTTTGACGTTCGGCCAAGGGACCAAAGTGGAAA
TCAAGCGG (SEQ ID NO: 1092)
BMS3h-193-2509
GACATCCAGATGACCCAGTCTCCATCCTCCCTGTCTGCATCTGTAGGAGACCGAGTCACCATCACTTGCCGGGCAAGTC
GGAACATTGACCGTCGTTTAAATTGGTACCAGCAGAAACCAGGGAAAGCCCCTAGGCTCCTGATCTATCTTGCTACCCG
TTTGCAAAGTGGGGTCCCATCACGCTTCAGTGGCAGTGGATCTGGGACAGATTTCACTCTCACCATCAGCAGTCTGCAA
CCTGAAGATTTTGCTACGTACTACTGTCATCAGTATGAGAGTCCACCTTTGACGTTCGGCCAAGGGACCAAAGTGGAAA
TCAAACGG (SEQ ID NO: 1093)
BMS3h-193-2510
GACATCCAGATGACCCAGTCTCCATCCTCCCTGTCTGCATCTGTAGGAGACCGAGTCACCATCACTTGCCGGGCAAGTC
AGAGCATTGGGCGTCGTTTAAATTGGTACCAGCAGAAACCTGGGAAAGCCCCTAGGCTCCTGATCTATCTTGCTACCCG
TTTGCAAAGTGGGGTCCCATCACGCTTCAGTGGCAGTGGATCTGGGACAGATTTCACTCTCACCATCAGCAGTCTGCAA
CCTGAAGATTTTGCTACGTACTACTGTCATCAGTATGAGAGTCCACCTTTGACGTTCGGCCAAGGGACCAAAGTGGAAA
TCAAACGG (SEQ ID NO: 1094)
BMS3h-193-2511
GACATCCAGATGACCCAGTCTCCATCCTCCCTGTCTGCATCTGTAGGAGACCGAGTCACCATCACTTGCCGGGCAAGTC
AGAACATTGGGACGCGTTTAAATTGGTACCAGCAGAAACCAGGGAAAGCCCCTAGGCTCCTGATCTATCTTGCTACCCG
TTTGCAAAGTGGGGTCCCATCACGCTTCAGTGGCAGTGGATCTGGGACAGATTTCACTCTCACCATCAGCAGTCTGCAA
CCTGAAGATTTTGCTACGTACTACTGTCATCAGTATGAGAGTCCACCTTTGACGTTCGGCCAAGGGACCAAAGTGGAAA
TCAAACGG (SEQ ID NO: 1095)
BMS3h-193-2512
GACATCCAGATGACCCAGTCTCCATCCTCCCTGTCTGCATCTGTAGGAGACCGAGTCACCATCACTTGCCGGGCAAGTG
AGGTCATTGGGCGTCGTTTAAATTGGTACCAGCAGAAACCAGGGAAAGCCCCTAGGCTCCTGATCTATCTTGCTACCCG
TTTGCAAAGTGGGGTCCCATCACGCTTCAGTGGCAGTGGATCTGGGACAGATTTCACTCTCACCATCAGCAGTCTGCAA
CCTGAAGATTTTGCTACGTACTACTGTCATCAGTATGAGAGTCCACCTTTGACGTTCGGCCAAGGGACCAAAGTGGAAA
TCAAACGG (SEQ ID NO: 1096)
BMS3h-193-2513
GACATCCAGATGACCCAGTCTCCATCCTCCCTGTCTGCATCTGTAGGAGACCGAGTCACCATCACTTGCCGGGCAAGTG
AGGCGATTGGCCGTCGTTTAAATTGGTATCAGCAGAAACCAGGGAAAGCCCCTAGGCTCCTGATCTATCTTGCTACCCG
TTTGCAAAGTGGGGTCCCATCACGCTTCAGTGGCAGTGGATCTGGGACAGATTTCACTCTCACCATCAGCAGTCTGCAA
CCTGAAGATTTTGCTACGTACTACTGTCATCAGTATGAGAGTCCACCTTTGACGTTCGGCCAAGGGACCAAAGTGGAAA
TCAAACGG (SEQ ID NO: 1097)
BMS3h-193-2514
GACATCCAGATGACCCAGTCTCCATCCTCCCTGTCTGCATCTGTAGGAGACCGAGTCACCATCACTTGCCGGGCAAGTA
CCAGCATTGCGCGTCGTTTAAATTGGTATCAGCAGAAACCTGGGAAAGCCCCTAGGCTCCTGATCTATCTTGCTACCCG
TTTGCAAAGTGGGGTCCCATCACGCTTCAGTGGCAGTGGATCTGGGACAGATTTCACTCTCACCATCAGCAGTCTGCAA
CCTGAAGATTTTGCTACGTACTACTGTCATCAGTATGAGAGTCCACCTTTGACGTTCGGCCAAGGGACCAAAGTGGAAA
TCAAACGG (SEQ ID NO: 1098)
BMS3h-193-2515
GACATCCAGATGACCCAGTCTCCATCCTCCCTGTCTGCATCTGTAGGAGACCGAGTCACCATCACTTGCCGGGCAAGTT
TGAACATTGGGCGTCGTTTAAATTGGTACCAGCAGAAACCAGGGAAAGCCCCTAGGCTCCTGATCTATCTTGCTACCCG
TTTGCAAAGTGGGGTCCCATCACGCTTCAGTGGCAGTGGATCTGGGACAGATTTCACTCTCACCATCAGCAGTCTGCAA
CCTGAAGATTTTGCTACGTACTACTGTCATCAGTATGAGAGTCCACCTTTGACGTTCGGCCAAGGGACCAAAGTGGAAA
TCAAACGG (SEQ ID NO: 1099)
BMS3h-193-2516
GACATCCAGATGACCCAGTCTCCATCCTCCCTGTCTGCATCTGTAGGAGACCGAGTCACCATCACTTGCCGGGCAAGTC
AGACGATTGAGCGTCGTTTAAATTGGTACCAGCAGAAACCAGGGAAAGCCCCTAGGCTCCTGATCTATCTTTCGTCGAA
GTTGCAAAGTGGGGTCCCATCACGCTTCAGTGGCAGTGGATCTGGGACAGATTTCACTCTCACCATCAGCAGTCTGCAA
CCTGAAGATTTTGCTACGTACTACTGTCATCAGTATGAGAGTCCACCTTTGACGTTCGGCCAAGGGACCAAAGTGGAAA
TCAAACGG (SEQ ID NO: 1100)
BMS3h-198-1
GAGGTGCAGCTGTTGGAGTCTGGGGGAGGCTTGGTTCAGCCTGGGGGGTCCCTGCGTCTCTCCTGTGCAGCCTCCGGAT
CCACCATTGCTGGGTATGAGATGTGGTGGGTCCGCCAGGCTCCAGGGAAGGGTCTAGAGCGTGTCTCAGCTATTAGTGG
TAGTGGTGGTAGCACATACTACGCAGACTCCGTGAAGGGCCGGTTCACCATCTCCCGAGACGATTCCAAGAACACGCTG
TATCTGCAAATGAACAGCCTGCGTGCCGAGGATACCGCGGTATATTACTGTGCGAGAGATCCTTATAGTTTTGACTACT
GGGGTCAGGGAACCCTGGTCACCGTCTCGAGC (SEQ ID NO: 1101)
BMS3h-198-2
GAGGTGCAGCCGTTGGAGTCTGGGGGAGGCTTGGTACAGCCTGGGGGGTCCCTGCGTCTCTCCTGTGCAGCCTCCGGAT
TCACCTTTGCTGGGTATGAGATGTGGTGGGTCCGCCAGGCTCCAGGGAAGGGTCTAGAGCGGATCTCAGCTATTAGCGG
TAGTGGTGGTAGCACATACTACGCAGACTCCGTGAAGGGCCGGTTCACCATCTCCCGCGACGATTCCAAGAACACGCTG
TATCTGCAAATGAACAGCCTGCGTGCCGAGGATACCGCGGTATATTACTGTGCGAGAGATCCTTATAGTTTTGACTACT
GGGGTCAGGGAACCCTGGTCACCGTCTCGAGC (SEQ ID NO: 1102)
BMS3h-198-3
GAGGTGCAGCTGTTGGAGTCTGGGGGAGGCTCGGTACAGCCTGGGGGGTCCCTGCGTCTCTCCTGTGCAGCCACCGGAT
CCACCTTTGCTGGGTATGAGATGTGGTGGGTCCGCCAGGCTCCAGGGAAGGGTCTAGAGCGGGTCTCAGCTATTAGTGG
TAGTGGTGGTAGCACATACTACGCAGACTCCGTGAAGGGCCGGTTCACCATCTCCCGCGACGATTCCAAGAACACGCTG
TATCTGCAAATGAACAGCCTGCGTGCCGAGGATACCGCGGTATATTACTGTGCGAGAGATCCTTACAGTTATGACTACT
GGGGTCAGGGAACCCTGGTCTCCGTCTCGAGC (SEQ ID NO: 1103)
BMS3h-198-4
GAGGTGCAGCTGTTGGAGTCTGGGGGAGGCTTGGTACAGCCTGGGGGGTCCCTGCGTCTCTCCTGTGCAGCCTCCGGAC
TCACCTTTGCTGGGTATGAGATGTGGTGGGTCCGCCAGGCACCAGGGAAGGGTCTAGAGCGGGTCTCAGCTATTAGTGG
TAGTGGTGGTAGCACATACTACGCAGACTCCGTGAAGGGCCGGTTCACCATCTCCCGCGACGATTCCAAGAACACGCTG
TATCTGCAAATGAACAGCCTGCGTGCCGAGGATACCGCAGTATATCACTGTGCGAGAGATCCTTATAGTTTTGACTACT
GGGGTCAGGGAACCCTGGTCACCGTCTCGAGC (SEQ ID NO: 1104)
BMS3h-198-5
GAGGTGCAGCTGTTGGAGTCTGGGGGAGGCTTGGTACAGCCTGGGGGGTCCCTGCGTCTCTCCTGTGCAGCCTCCGGAT
TCACCTTTGCTGGGTATGAGATGTGGTGGGTCCGCCAGGCTCCAGGGAAGGGTCTAGAGCGGGTCTCAGCTATTAGTGG
TAGTGGTGGTAGCACATACTACGCAGACTCTGTGAAGGGCCGGTTCACCATCTCCCGCGACGATTCCAAGAACACGCTG
TATCTGCAAATGAACAGCCTGCGTGCCGAGGATACCGCGGTATATCACTGTGCGAAAGAACCTTATAGTTATGACTACT
GGGGTCAGGGAACCCTGGTCACCGTCTCGAGC (SEQ ID NO: 1105)
BMS3h-198-6
GAGGTGCAGCTGTTGGAGTCTGGGGGAGGCTTGGTACAGCCTGGGGGGTCCCTGCGTCTCTCCTGTGCAGCCTCCGGAT
CCACCTTTGCTGGGTATGAGATGTGGTGGGTCCGCCAGGCTCCAGGGAAGGGTCTAGAGCGGGTCTCAGCTATTAGTGG
TAGTGGTGGTAGCACATACTACGCAGACTCCGTGAAGGGCCGGTTCACCATCTCCCGCGACGATTCCAAGAACACGCTG
TATCTGCAAATGAACAGCCTGCGTCCCGAGGATACCGCGGTATATTACTGTGTGAAAGATCCTTATAGTTTTGACTACT
GGGGTCAGGGAACCCTGGTCACCGTCTCGAGC (SEQ ID NO: 1106)
BMS3h-198-7
GAGGTGCAGCTGTTGGAGTCTGGGGGAGGCTTGGTACAGCCTGGGGGGTCCCTGCGTCTCTCCTGTGCAGCCTCCGGAT
CCACCATTGCCGGGTATGAGATGTGGTGGGTCCGCCAGGCTCCGGGGAAGGGTCTAGAGCGGGTCTCAGCTATTAGTGG
TAGTGGTGGTAGCACATACTACGCAGACTCCGTGAAGGGCCGGTTCACCATCTCCCGCGACGATTCCAAGAACACGCTG
TATCTGCAAATGAACAGCCTGCGTGCCGAGGATACCGCGGTATATTACTGTGCGAGAGATCCTTATAGTTTTGACTACT
GGGGTCAGGGAACCCCGGTCACCGTCTCGAGC (SEQ ID NO: 1107)
BMS3h-198-8
GAGGTGCAGCTGATGGAGTCTGGGGGAGGCTTGGTACAGCCTGGGGGGTCCCTGCGTCTCTCCTGTGCAGCCTCCGGAT
CCACCTTTGCTGGGTATGAGATGTGGTGGTACCGCCAGGCTCCAGGGAAGGGTCTAGAGCGGGTCTCAGCTATTAGTGG
AAGTGGTAGAAGCACATACTACGCAGACTCCGTGAAGGGCCGGTTCACCATCTCCCGCGACGATTCCAAGAACACGCTG
TATCTGCAAATGAACAGCCTGCGTGCCGAGGATACCGCGGTATATTACTGTGCGAAAGATCCTTATAGTTTTGACTACT
GGGGTCAGGGAACCCTGGTCACCGTCTCGAGC (SEQ ID NO: 1108)
BMS3h-198-9
GAGGTGCAGCTGCTGGAGTCTGGGGGAGGCTTGGTACAGCCTGGGGGGTCCCTGCGTCTCTCCTGTGCAGCCTCCGGAT
TCACCTTTGCTGGGTATGAGATGTGGTGGGTCCGCCAGGCTCCAGGGAAGGGTCTAGAGCGGGTCTCAGCTATTAGTGG
TAGTGGTGGTAGCACGTACTACGCAGACTCCGTGAAGGGCCGGTTCACCATCTCCCGCGACGATTCCAAGAACACGCTG
TATCTGCAAATGAACAGCCTGCGTGCCGAGGATACCGCAGTATATTACTGTGCGAAAGAACCTTATAGTTTTGACTACT
GGGGTCAGGGAACCCTGGTCACCGTCTCGAGC (SEQ ID NO: 1109)
BMS3h-198-10
GAGGTGCAGCTGTTGGAGTCTGGGGGAGGCTTGGTACAGCCTGGGGGGTCCCTGCGTCTCTCCTGTGCAGCCTCCGGAT
CCACCATTGCTGGGTATGAGATGTGGTGGGTCCGCCAGGCTCCAGGGAAGGGTCTAGAGCGGGTCTCAGCTATTAGTGG
TAGTGGTGGTAGCACATACTACGCAGACTCCGTGAAGGGCCGGTTCACCATCTCCCGCGACGATTCCAAGAACACGCTG
TATCTGCAAATGAACAGCCTGCGTGCCGAGGATACCGCGGTATATTACTGTGCGAAAGATCCATATAGTTTTGACTACT
GGGGTCAGGGAACCCTGGTCACCGTCTCGAGC (SEQ ID NO: 1110)
BMS3h-198-11
GAGGTGCAGCTGTTGGAGTCTGGGGGAGGCTTGGTACAGCCTGGGGGGTCCCTGCGTCTCTCCTGTGCAGCCTCCGGAT
TCACCTTTGCTGGGTATGAGATGTGGTGGGTCCGCCAGGCTCCAGGGAAGGGTCTAGAGCGGGTCTCAGCTATTAGTGG
TAGTGGTGGTAGCACATACTACGCAGACTCCGTGAAGGGCCGGTTCACCATCTCCCGCGACGATTCCAAGAACACGCTG
TATCTGCAAATGAACAGCCTGCGTGCCGAGGATACCGCGGTATATTACTGTGCGAGAGACCCTTATAGTTTTGACTACT
GGGGTCAGGGAACCCTGGTCTCCGTCTCGAGC (SEQ ID NO: 1111)
BMS3h-198-12
GAGGTGCAGCTGTTGGAGTCTGGGGGAGGCTTGGTACAGCCTGGGGGGTCCCTGCGTCTCTCCTGTGCAGCCTCCGGAT
TCACCATTGCTGGGTATGAGATGTGGTGGGTCCGCCAGGCTCCAGGGAAGGGTCTAGAGCGGGTCTCCGCTATTAGTGG
TAGTGGTGGTAGCACATACTACGCGGACTCCGTGAAGGGCCGGTTCACCATCTCCCGCGACGATTCCAAGAACACGCTG
TATCTGCAAATGAACAGCCTGCGTGCCGAGGATACCGCGGTATATTACTGTGCGAAAGATCCTTATAGTTTTGACTACT
GGGGTCAGGGAACCCTGGTCACCGTTTCGAGC (SEQ ID NO: 1112)
BMS3h-198-13
GAGGTGCAGCTGTTGGAGTCTGGGGGAGGCTTGGTACAGCCTGGGGGGTCCCTGCGTCTCTCCTGTGCAGCCTCCGGAT
TCACCTTTGCTGGGTATGAGATGTGGTGGGTCCGCCAGGCTCCAGGGAAGGGTCTAGAGCGTGTCTCAGCTATTAGTGG
TAGTGGTGGTAGCACATACTACGCAGACTCCGTGAAGGGCCGGTTCACCATCACCCGCGACGATTCCAAGAACACGCTG
TATCTGCAAATGAACAGCCTGCGTGCCGAGGATACCGCGGTATATTACTGTGCGAAAGAGCCTTATAGTTTTGACTACT
GGGGTCAGGGAACCCTGGTCACCGTCTCGAGC (SEQ ID NO: 1113)
BMS3h-198-14
GAGGTGCAGCTGTTGGAGTCTGGGGGAGGCTTGGTACAGCCTGGGGGGTCCCTGCGTCTCTCCTGTGCAGCCTCCGGAT
TCACCTTTGCTGGGTATGAGATGTGGTGGTTCCGCCAGGCTCCAGGGAAGGGTCTAGAGCGGGTCTCAGCTATTAGTGG
TAGTGGTGGTAGCACATACTACGCAGACTCCGTGAAGGGCCGGTTCACCATCTCCCGCGACGATACCAAGAACACGCTG
TATCTGCAAATGAACAGCCTGCGTGCCGAGGATACCGCGGTATATTACTGTGCGAAAGATCCTTATAGTTTTGACTACT
GGCGTCAGGGAACCCTGGTCACCGTCTCGAGC (SEQ ID NO: 1114)
BMS3h-198-15
GAGGTGCAGCTGTTGGAGTCTGGGGGAGGCTTGGTACAGCCTGGGGGGTCCCTGCGTCTCTCCTGTGCAGCCTCCGGAT
CCACCTTTGCTGGGTATGAGGTGTGGTGGGTCCGCCAGGCTCCAGGGAAGGGTCTGGAGCGGGTCTCAGCTATTAGTGG
TAGTGGTGGTAGCACATACTACGCAGACTCCGTGAAGGGCCGGTTCACCATCTCCCGCGACGATTCCAAGAACACGCTG
TATCTGCAAATGAACAGCCTGCGTGCCGAGGATACCGCGGTATATTACTGTGCGAGAGATCCTTATAGTTTTGACTACT
GGGGTCAGGGAACCCTGGTCACCGTCTCGAGC (SEQ ID NO: 1115)
BMS3h-198-16
GAGGTGCAGCTGTTGGAGTCTGGGGGAGGCTTGGTACAGCCTGGGGGGTCCCTGCGTCTCTCCTGTGCAGCCTCCGGAT
CCACCTTTGCTGGGTATGAGATGTGGTGGGTCCGCCAGGCTCCAGGGAAGGGTCTAGAGCGGATCTCAGCTATTAGTGG
TAGTGGTGGTAGCACATACTACGCAGACTCCGTGAAGGGCCGGTTCACCATCTCCCGCGACGATTCCAAGAACACGCTG
TATCTGAAAATGAACAGCCTGCGTGCCGAGGATACCGCGGTATATTACTGTGCGAAAGATCCTTATAGTTTTGACTACT
GGGGTCAGGGAACCCTGGTCACCGTCTCGAGC (SEQ ID NO: 1116)
BMS3h-198-17
GAGGTGCAGCTGTTGGAGTCTGGGGGAGGCTTGGTACAGCCTGGGGGGTCCCTGCGTCTCTCCTGTGCAGCCTCCGGAT
TCACCTTTGCTGGGTATGAGATGTGGTGGGTCCGCCAGGCTCCAGGGAAGGGTCTAGAGCGGGTCTCAGCTATTAGTGG
TAGTGGTGGTAGCACATACTACGCAGACTCCGTGAAGGGCCGGTTCACCATCTCCCGCGACGATTCCAAGAACACGCTG
TATCTGCAAATGAACAGCCTGCGTGCCGAGGATACCGCGGTATATTACTGTGCGAGAGATCCTTATAGTTTTGACTACT
GGGGTCAGGGAACCCTGGTCACCGTCTCGAGC (SEQ ID NO: 1117)
BMS3h-198-18
GAGGTGCAGCTGTTGGAGTCTGGGGGAGGCTTGGTACAGCCTGGGGGGTCCCTGCGTCTCTCCTGTGCAGCCTCCGGAC
TCACCTTTGCTGGGTATGAGATGTGGTGGGTCCGCCGGGCTCCAGGGAAGGGTCTAGAGCGGGTCGCAGCTATTAGTGG
TAGTGGTGGTAGCACATACTACGCAGACTCCGTGAAGGGCCGGTTCACCATCTCCCGCGACGATTCCAAGAACACGCTG
TATCTGCAAATGAACAGCCTGCGTGCCGAGGATACCGCGGTATATTACTGTGCGAGAGATCCTTATAGTTTTGACTACT
GGGGTCAGGGAACCCTGGTCACCGTCTCGAGC (SEQ ID NO: 1118)
BMS3h-198-19
GAGGTGCAGCTGTTGGAGTCTGGGGGAGGCTTGGTACAGCCTGGGGGGTCCCTGCGTCTCTCCTGTGCAGCCTCCGGAT
TCACCTTTGCTGGGTATGAGTTGTGGTGGGTCCGCCAGGCCCCAGGGAAGGGTCTAGAGCGGGTCTCAGCTATTAGTGG
AAGTGGTGGTAGCACATACTACGCAGACTCCGTGAAGGGCCGGTTCACCATCTCCCGCGACGATTCCAAGAACACGCTG
TATCTGCAAATGAACAGCCTGCGTGCCGAGGATACCGCGGTATATTACTGTGCGAGAGATCCTTATAGTTTTGACTACC
GGGGTCAGGGAACCCTGGTCACCGTCTCGAGC (SEQ ID NO: 1119)
BMS3h-198-20
GAGGTGCAGCTGTTGGAGTCTGGGGGAGGCTTGGTACAGCCTGGGGGGTCCCTGCGTCTCTCCTGTGCAGCCCCCGGAT
TCACCTTAGCTGGGTATGAGATGTGGTGGGTCCGCCAGGCTCCAGGGAAGGGTCTAGAGCGGGTCTCAGCTATTAGTGG
TAGTGGTGGTAGCACATACTACGCAGACTCCGTGAAGGGCCGGTTCACCATCTCCCGCGACGATTCCAAGAACACGCTG
TATCTGCAAATGAACAGCCTGCGTGCCGAGGATACCGCGGTATATTACTGTGCGAAAGAACCTTATAGTTTTGACTACT
GGGGTCAGGGAACCCTGGTCACCGTCTCGAGC (SEQ ID NO: 1120)
BMS3h-198-21
GAGGTGCAGCTGTTGGAGTCTGGGGGAGGCTTGGTACAGCCTGGGGGGTCCCTGCGTCTCTCCTGTGCAGCCTCCGGAC
TCACCTTTGCTGGGTATGAGATGTGGTGGGTCCGTCGGGCTCCAGGGAAGGGTCTAGAGCGGGTCTCAGCTATTAGTGG
TAGTGGTGGTAGCACATACTACGCAGACTCCGTGAAGGGCCGGTTCACCACCTCCCGCGACGATTCCAAGAACACGCTG
TATCTGCAAATGAACAGCCTGCGTGCCGAGGATACCGCGGTATATTACTGTGCGAGAGATCCTTATAGTTTTGACTACT
GGGGTCGGGGAACCCTGGTCACCGTCTCGAGC (SEQ ID NO: 1121)
BMS3h-198-22
GAGGTGCAGCTGTTGGAGTCTGGGGGAGGCTTGGTACAGCCCGGGGGGTCCCTGCGTCTCTCCTGTGCCGCCTCCGGAT
TCACCTTTGCTGGGTATGAGATGTGGTGGGTCCGCCAGGCTCCAGGGAAGGGTCTAGAGCGGGTCTCAGCTATTAGTGG
TAGCGGTGGTAGCACATACTACGCAGACTCCGTGAAGGGCCGGTTCACCATCTCCCGCGACGATTCCAAGAACACGCTG
TATCTGCAAATGAACAGCCTGCGTGCCGAGGATACCGCGGTATATTACTGTGCGAAAGAACCTTATAGTTATGACTACT
GGGGTCATGGAACCCTGGTTACTGTCTCGAGC (SEQ ID NO: 1122)
BMS3h-198-23
GAGGTGCAGCCGTTGGAGTCTGGGGGAGGCTTGGTACAGCCTGGGGGGTCCCTGCGTCTCTCCTGTGCAGCCTCCGGAT
TCACCTTTGCTGGGTATGAGATGTGGTGGGTCCGCCAGGCTCCAGGGAAGGGTCTAGAGCGGGTCTCAGCTATTAGTGG
TAGTGGTGGTAACACATACTACGCAGACTCCGTGAAGGGCCGGTTCACCATCTCCCGCGACGATTCCAAGAACACGCTG
TATCTGCAAATGAACAGCCTGCGTGCCGAGGATACCGGGGTATATTACTGTGCGAGAGATCCTTATAGTTTTGACTACT
GGGGTCAGGGTACCCTGGTCACCGTCTCGAGC (SEQ ID NO: 1123)
BMS3h-198-24
GAGGTGCAGCTGTTGGAGTCTGGGGGAGGCTTGGTACAGCCTGGGGGGTCCCTGCGTCTCTCCTGTGCAGCCTCCGGAT
TCACCTTTGCTGGGTATGAGATGTGGTGGGTCCGCCAGGCTCCAGGGAAGGGTCTAGAGCGGGTCTCAGCTATTAGTGG
TAGTGGTGGTAGCACATACTACGCAGACTCCGTGAAGGGCCGGTTCACCATCTCCCGCGACGATTCCAAGAACACGCTG
TATCTGCAAATGAACAGCCTGCGTGCCGAGGATACCGCGGTATATTACTGTGCGAAAGAACCTTATAGTTTTGACTCCT
GGGGTCAGGGAACCCTGGTCACCGTCTCGAGC (SEQ ID NO: 1124)
BMS3h-198-25
GAGGCGCAGCTGTTGGAGTCTGGGGGAGGCTTGGTACAGCCTGGGGGGTCCCTGCGTCTCTCCTGTGCAGCCTCCGGAT
TAACCTTCGCTGGGTATGAGATGTGGTGGGTCCGCCAGGCTCCAGGGAAGGGTCTAGAGCGCGTCTCAGCTATTAGTGG
TAGTGGCGGTAGCACATACTACGCAGACTCCGTGAAGGGCCGGTTCACCATCTCCCGCGACGATTCCAAGAACACGCTG
TATCTGCAAATGAACAGCCTGCGTGCCGAGGATACCGCGGTATATTACTGTGCGAGAGATCCTTATAGTTTTGACTACT
GGGGTCAGGGAACCCTGGTCACCGTCTCGAGC (SEQ ID NO: 1125)
BMS3h-198-26
GAGGTGCAGCTGTTGGAGTCTGGGGGAGGCTTGGTACAGCCTGGGGGGTCCCTGCGTCTCTCCTGTGCAGCCTCCGGAT
CCACCTTTGCTGGGTATGAGATGTGGTGGGTCCGCCAGGCTCCAGGGAAGGGTCTAGAGCGGGTCTCAGCTATTAGTGG
TAGTGGTGGTAGCACATACTACGCAGACTCCGTGAAGGGCCGGTTCTCCATCTCCCGCGACGATTCCAAGAACACGCTG
TATCTGCAAATGAACAGCCTGCGTGCCGAGGATACCGCGGTATATTACTGTGCGAAAGAACCTTATAGTTTTGACCACT
GGGGTCAGGGAACCCTGGTCACCGTCTCGAGC (SEQ ID NO: 1126)
BMS3h-198-27
GAGGTGCAGCTGTTGGAGTCTGGGGGAGGCTTGGTACAGCCTGGGGGGTCCCTGCGTCTCTCCTGTGCAGCCTCGGGAT
CCACCTTTGCTGGGTATGAGATGTGGTGGGTCCGCAGGGCTCCAGGGAAGGGTCTAGAGCGGGTCTCAGCTATTAGTGG
TAGTGGTGGTAGCACATACTACGCAGACTCCGTGAAGGGCCGGTTCACCATCTCCCGCGACGATTCCAAGAACACGCTG
TATCTGCAAATGAACAGCCTGCGTGCCGAGGATACCGCGGTATATTACTGTGCGAGAGATCCTTATAGTTTTGACTACT
GGGGTCAGGGAACCCTGGTCACCGTCTCGAGC (SEQ ID NO: 1127)
BMS3h-198-28
GAGGTGCAGCTGTTGGAGTCTGGGGGAGGCTTGGTACAGCCTGGGGGGTCCCTGCGTCTCTCCTGTGCAGCCTCCGGAT
TCACCTTTGCTGGGTATGAGATGTGGTGGTTCCGCCAGGCTCCAGGGAAGGGTCTAGAGCGGGTCTCAGCTATTAGTGG
TAGTGGTGGTAGCACATACTACGCAGACTCCGTGAAGGGCCGGTTCACCATCTCCCGCGACGATTCCAAGAACACGCTG
TATCTGCAAATGAACAGCCTGCGTGCCGAGGATACCGCGGTATATTACTGTGCGAAAGATCCTTATAGTTTTGACAACT
GGGGTCAGGGAACCCTGGTCACCGTCTCGAGC (SEQ ID NO: 1128)
BMS3h-198-29
GAGGTGCAGCTGTTGGAGTCTGGGGGAGGCTTGGTAGAGCCTGGGGGGTCCCTGCGTCTCTCCTGTGCAGCCTCCGGAT
TCACCTTTGCTGGGTATGAGATGTGGTGGGTCCGCCAGGCTCCAGGGAAGGGTCTAGAGCGGGTCTCAGCTATTAGTGG
TAGTGGTGGTAGCACATACTACGCAGACTCCGTGAAGGGCCGGTTCACCATCTCCCGCGACGATTCCAAGAACACGCTG
TATCTGCAAATGAACAGCCTGCGTGCCGAGGATACCGCGGTATATTACTGTGCGAAAGAACCTTATAGTTTTGACCACC
GGGGTCAGGGAACCCTGGTCACCGTCTCGAGC (SEQ ID NO: 1129)
BMS3h-198-30
GAGGTGCAGCTGTTGGAGTCTGGGGGAGGCTTGGTACAGCCTGGGGGGTCCCTGCGTCTCTCCTGTGCAGCCTCCGGAT
ACACCTTTGCTGGGTATGAGATGTGGTGGGTCCGCCAGGCTCCAGGGAAGGGTCTAGAGCGGGTCTCAGCTATTAGTGG
TAGTGGTGGTAGCACATACTACGCAGACTCCGTGAAGGGCCGGTTCACCATCTCCCGCGACGATTCCAAGAACACGCTG
TATCTGCAAATGAACAGCCTGCGTGCCGAGGATACCGCGGTATATTACTGTGCGAAAGAACCTTATAGTTTTGACCACC
GGGGTCAGGGAACCCTGGTCACCGTCTCGAGC (SEQ ID NO: 1130)
BMS3h-198-31
GAGGTGCAGCTGTTGGAGTCTGGGGGAGGCTTGGTACAGCCTGGGGGGTCCCTGCGTCTCTCCTGTGCAGCCTCCGGAT
TCACCTTTGCTGGGTATGAGATGTGGTGGGTCCGCCAGGCTCCAGGGAAGGGTCTAGAGCGGGTCTCAGCTATTAGTGG
TAGTGGTGGTAGCACATACTACGCAGACTCTGTGAAGGGCCGGTTCACCATCTCCCGCGACAATTCCAAGAACACGCTG
TATCTGCAAATGAACAGCCTGCGTGCCGAGGATACCGCGGTATATCACTGTGCGAAAGAACCTTATAGTTATGACTACT
GGGGTCAGGGAACCCTGGTCACCGTCTCGAGC (SEQ ID NO: 1131)
BMS3h-198-32
GAGGTGCAGCTGTTGGAGTCTGGGGGAGGCTTGGTACAGCCTGGGGGGTCCCTGCGTCTCTCCTGTGCAGCCTCCGGAT
TCACCTTTGCTGGGTATGAGATGTGGTGGTTCCGCCAGGCTCCAGGGAAGGGTCTAGAGCGGGTCTCAGCTATTAGTGG
TAGTGGTGGTAGCACATACTACGCAGACTCCGTGAAGGGCCGGTTCACCATCTCCCGCGACAATTCCAAGAACACGCTG
TATCTGCAAATGAACAGCCTGCGTGCCGAGGATACCGCGGTATATTACTGTGCGAAAGATCCTTATAGTTTTGACAACT
GGGGTCAGGGAACCCTGGTCACCGTCTCGAGC (SEQ ID NO: 1132)
BMS3h-198-33
GAGGTGCAGCTGTTGGAGTCTGGGGGAGGCTTGGTACAGCCTGGGGGGTCCCTGCGTCTCTCCTGTGCAGCCTCCGGAT
TCACCTTTGCTGGGTATGAGATGTGGTGGGTCCGCCAGGCTCCAGGGAAGGGTCTAGAGCGGGTCTCAGCTATTAGTGG
TAGTGGTGGTAGCACATACTACGCAGACTCTGTGAAGGGCCGGTTCACCATCTCCCGCGACGATTCCAAGAACACGCTG
TATCTGCAAATGAACAGCCTGCGTGCCGAGGATACCGCGGTATATTACTGTGCGAAAGAACCTTATAGTTATGACTACT
GGGGTCAGGGAACCCTGGTCACCGTCTCGAGC (SEQ ID NO: 1133)
BMS3h-198-34
GAGGTGCAGCTGTTGGAGTCTGGGGGAGGCTTGGTACAGCCTGGGGGGTCCCTGCGTCTCTCCTGTGCAGCCTCCGGAT
TCACCTTTGCTGGGTATGAGATGTGGTGGGTCCGCCAGGCTCCCGGGAAGGGTCTAGAGCGGGTCTCAGCTATTAGTGG
TAGTGGTGGTAGCACATACTACGCAGACTCCGTGAAGGGCCGGTTCACCATCTCCCGCGACGATTCCAAGAACACGCTG
TATCTGCAAATGAACAGCCTGCGTGCCGAGGATACCGCGGTATATTACTGTGCGAAAGATCCTTATAGTTTTGACAACT
GGGGTCAGGGAACCCTGGTCACCGTCTCGAGC (SEQ ID NO: 1134)
BMS3h-198-35
GAGGTGCAGCTGTTGGAGTCTGGGGGAGGCTTGGTACAGCCTGGGGGGTCCCTGCGTCTCTCCTGTGCAGCCTCCGGAT
TCACCTTTGCTGGGTATGAGATGTGGTGGGTCCGCCAGGCTCCAGGGAAGGGTCTAGAGTGGGTCTCAGCTATTAGTGG
TAGTGGTGGTAGCACATACTACGCAGACTCTGTGAAGGGCCGGTTCACCATCTCCCGCGACGATTCCAAGAACACGCTG
TATCTGCAAATGAACAGCCTGCGTGCCGAGGATACCGCGGTATATCACTGTGCGAAAGAACCTTATAGTTATGACTACT
GGGGTCAGGGAACCCTGGTCACCGTCTCGAGC (SEQ ID NO: 1135)
BMS3h-198-36
GAGGTGCAGCTGTTGGAGTCTGGGGGAGGCTTGGTACAGCCTGGGGGGTCCCTGCGTCTCTCCTGTGCAGCCTCCGGAT
TCACCTTTGCTGGGTATGAGATGTGGTGGTTCCGCCAGGCTCCAGGGAAGGGTCTAGAGTGGGTCTCAGCTATTAGTGG
TAGTGGTGGTAGCACATACTACGCAGACTCCGTGAAGGGCCGGTTCACCATCTCCCGCGACGATTCCAAGAACACGCTG
TATCTGCAAATGAACAGCCTGCGTGCCGAGGATACCGCGGTATATTACTGTGCGAAAGATCCTTATAGTTTTGACAACT
GGGGTCAGGGAACCCTGGTCACCGTCTCGAGC (SEQ ID NO: 1136)
BMS3h-198-37
GAGGTGCAGCTGTTGGAGTCTGGGGGAGGCTTGGTACAGCCTGGGGGGTCCCTGCGTCTCTCCTGTGCAGCCTCCGGAT
TCACCTTTGCTGGGTATGAGTTGTGGTGGGTCCGCCAGGCCCCAGGGAAGGGTCTAGAGCGGGTCTCAGCTATTAGTGG
AAGTGGTGGTAGCACATACTACGCAGACTCCGTGAAGGGCCGGTTCACCATCTCCCGCGACGATTCCAAGAACACGCTG
TATCTGCAAATGAACAGCCTGCGTGCCGAGGATACCGCGGTATATTACTGTGCGAAAGATCCTTATAGTTTTGACTACC
GGGGTCAGGGAACCCTGGTCACCGTCTCGAGC (SEQ ID NO: 1137)
BMS3h-198-38
GAGGTGCAGCTGTTGGAGTCTGGGGGAGGCTTGGTACAGCCTGGGGGGTCCCTGCGTCTCTCCTGTGCAGCCTCCGGAT
TCACCTTTGCTGGGTATGAGTTGTGGTGGGTCCGCCAGGCCCCAGGGAAGGGTCTAGAGCGGGTCTCAGCTATTAGTGG
AAGTGGTGGTAGCACATACTACGCAGACTCCGTGAAGGGCCGGTTCACCATCTCCCGCGACGATTCCAAGAACACGCTG
TATCTGCAAATGAACAGCCTGCGTGCCGAGGATACCGCGGTATATTACTGTGCGAGAGATCCTTATAGTTTTGACTACT
GGGGTCAGGGAACCCTGGTCACCGTCTCGAGC (SEQ ID NO: 1138)
BMS3h-202-1
GAGGTGCAGCTGTTGGAGTCTGGGGGGGGCTTGGTACAGCCTGGGGGGTCCCTGCGTCTCTCCTGTGCAGCCTCCGGAT
TCACCTTTCCGACTGCTGAGATGCTGTGGGTCCGCAAGGCTCCAGGGAAGGGTCTAGAGTGGGTCTCATCTATTTCGGC
TAGTGGTGGTTCTACATACTACGCAGACTCCGTGAAGGGCCGGTTCACCATCTCCCGCGACAATTCCAAGAACACGCTG
TATCTGCAAATGAACAGCCTGCGTGCCGAGGACACCGCGGTATATTACTGTGCGAAAGAGCCGGTGAGTTATGTGGCGA
CGTTTGACTACTGGGGTCAGGGAACCCTGGTCACCGTCTCGAGC (SEQ ID NO: 1139)
BMS3h-202-2
GAGGTGCAGCTGTTGGTGTCTGGGGGAGGCTTGGTACAGCCTGGGGGGTCCCTGCGTCTCTCCTGTGCAGCCTCCGGAT
TCACCTTTCCGACTGCTGAGATGTTGTGGGTCCGCCAGGCTCCAGGGAAGGGTCCAGAGTGGGTCTCATCAATTTCGGC
TAGTGGTGGTTCTACATACTATGCAGACTCCGTGAAGGGCCGGTTCACCATCTCCCGCGACAATTCCAAGAACACGCTG
TATCTGCAAATGAACAGCCTGCGTGCCGAGGACACCGCGGTATATTACTGTGCGAAAGAGCCGGTGAGTTATGTGGCGA
CGTTTGACTACTGGGGTCAGGGAACCCTGGTCACCGTCTCGAGC (SEQ ID NO: 1140)
BMS3h-202-3
GAGGTGCAGCTGTTGGAGTCTGGGGGAGGCTTGGTACAGCCTGGGGGGTCCCTGCGTCTCTCGTGTGCAGCCTCCGGAT
TCACCTTTCCGACTGCCGAGATGGTGTGGGTCCGCAAGGCTCCAGGGATGGGTCTAGAGTGGGTCTCATCTATTTCGGC
TAGTGGTGGTTATACATACTACGCAGACTCCGTGAAGGGCCGGTTCACCATCTCCCGCGACAATTCCAAGAACATGCTG
TATCTGCAAATGAACAGCCTGCGTGCCGAGGACACCGCGGTATATTACTGTGCGAAAGAGCCGGTGAGTTATGTGGCGA
CGTTTGACTACTGGGGTCAGGGAGCCCTGGTCACCGTCACGAGC (SEQ ID NO: 1141)
BMS3h-202-4
GAGGTGCAGCTGTTGGTGTCTGGGGGAGGCTTGGTACAGCCTGGGGGGTCCCTGCGTCTCTCCTGTGCAGCCTCCGGAT
TCACCTTTCCGACTGCTGAGATGGTGTGGGTCCGCCAGGCTCCAGGGAAGGGTCTAGAGTGGGTCTCATCTATTTCGGC
TAGTGGTGGTTCTACATACTACGCAGACTCCGTGAAGGGCCGGTTCTCCATCTCCCGCGACGATTCCAAGAACACGCTG
TATCTGCAAATGAACAGCCTGCGTGCCGAGGACACCGCGGTATATTACTGTGCGAAAGAGCCGGTGAGTTATGTGGCGA
CGTTTGACTACTGGGGTCATGGAGCCCTGGTCACCGTCTCGAGC (SEQ ID NO: 1142)
BMS3h-202-5
GAGGTGCAGCTGTTGGAGTCTGGGGGAGGCTTGGTACAGCCTGGGGGGTCCCTGCGTCTCTCCTGTGCAGCCTCCGGAT
TCACATTTCCGACTGCTGAGATGTTGTGGGTCCGCCAGGCTCCAGGGAAGGGTCTAGAGTGGGTCTCATCTATTTCGGC
TAGTGGTGGTTCTACATACTACGCAGACTCCGTGAAGGGCCGGTTCACCATCTCCCGCGACAATTCCAAGAACACGCTG
TATCTGCAAATGAACAGCCTGCGAGCCGAGGACACCGCGGTATATTACTGTGCGAAAGAGCCGGTGAGTTATGTGGCAA
CGTTTGACTACTGGGGTCAGGGAACCCTGGTCACCGTCTCGAGC (SEQ ID NO: 1143)
BMS3h-202-6
GAGGCGCAGCTGTTGGAGTCTGGGGGTGGCTTGGTACAGCCTGGGGGGTCCCTGCGTCTCTCCTGTGCAGCCTCCGGAT
TCACCTTTCCGACTGCTGAGATGGTGTGGGTCCGCCAGGCTCCAGGGAAGGGTCTAGAGTGGATCTCATCTATTTCGGC
TAGTGGTGGTTCTACATACTACGCAGACTCCGTGAAGGGCCGGTTCACCATCTCCCGCGACAATTCCAAGAACACGCTG
TATCTGCAATTGAACAGCCTGCGTGCCGAGGACACCGCGGTATATTACTGTGCGAAAGAGCCGGTGAGTTATGTGGCGA
CGTTTGACTACTGGGGTCGGGGAACCCTGGTCACCGTCTCGAGC (SEQ ID NO: 1144)
BMS3h-202-7
GAGGTGCAGCTGTTGGAGTCTGGGGGAGGCTTGGTACAGCCTGGGGGGTCCCTGCGTCTCTCCTGTGCAGCCTCCGGAT
TCACATTTCCGACTGCTGAGATGTTGTGGGTCCGCCAGGCTCCAGGGAAGGGTCTAGAGTGGGTCTCATCTATTTCGGC
TAGTGGTGGTTCTACATACTACGCAGACTCCGTGAAGGGCCGGTTCACCATCTCCCGCGACAATTCCAAGAGCACGCTG
TATCTGCAAATGAACAGCCTGCGTGCCGAGGACACCGCGGTATATTACTGTGCGAAAGAGCCGGTGAGTTATGTGGCGA
CGTTTGACTACTGGGGTCCAGGAGCCCTGGTCACCGTCTCGAGC (SEQ ID NO: 1145)
BMS3h-202-8
GAGGTGCAGCTGTTGGAGTCCGGGGGAGGCTTGGTACAGCCTGGGGGGTCCCTGCGTCTCTCCTGTGCAGCCTCCGGAT
TCACCTTTCCGACTGCTGAGATGCTGTGGGTCCGCAAGGCTCCAGGGAAGGGTCTAGAGTGGGTCTCATCTATTTCGGC
TAGTGGTGGTTCTACATACTACGCAGACTCCGTGAAGGGCCGGTTCACCATCTCCCGCGACAATTCCAAGAACACGCTG
TTTCTGCAAATGAACAGCCTGCGTGCCGAGGACACCGCGGTATATTACTGTGCCAAAGAGCCGGTGAGTTATGTGGCGA
CGTTTGACTACTGGGGTCAGGGAACCCTGGTCACCGTCTCGAGC (SEQ ID NO: 1146)
BMS3h-202-9
GAGGTGCAGCTGTTGGAGTCTGGGGGAGGCTTGGTACAGCCTGGGGGGTCCCTGCGTCTCTCCTGTGCAGCCTCCGGAT
TCACATTTCCGACTGCTGAGATGTTGTGGGTCCGCCAGGCTCCAGGGAAGGGTCTAGAGTGGGTCTCATCTATTTCGGC
TAGTGGTGGTTCTACATACTACGCAGACTCCGTGAAGGGCCGGTTCACCATCTCCCGCGACAATTCCAAGAACACGCTG
TATCTGCAAATGAACAGCCTGCGTGCCGAGGACACCGCGGTATATTACTGTGCGAAAGAGCCGGTGAGTTATGTGGCGA
CGTTTGACTACTGGGGTCCAGGAGCCCTGGTCACCGTCTCGAGC (SEQ ID NO: 1147)
BMS3h-202-10
GAGGTGCAGCTGTTGGAGTCTGGGGGAGGCTTGGTACAGCCTGGGGGGTCCCTGCGTCTCTCCTGTGCAGCCTCCGGAT
TCACCTTTCCGACTGCTGAGATGCTGTGGGTCCGCCAGGCTCCAGGGAAGGGTCTAGAGTGGGTCTCATCTATTTCGGC
TAGTGGTGGTTCTACATACTACGCAGACTCCGTGAAGGGCCGGTTCACCATCTCCCGCGACAATTCCAAGAACACGCTG
TATTTGCAAATGAACAGCCTGCGTGCCGAGGACACCGCGGTATATTACTGTGCGAAAGAGCCGGTGTATTATGTGGCGA
CGTTTGACTACTGGGGTCAGGGAACCCTGGTCACCGTCTCGAGC (SEQ ID NO: 1148)
BMS3h-202-11
GAGGTGCAGCTGTTGGAGTCCGGGGGAGGCTTGGTACAGCCTGGGGGGTCCCTGCGTCTCTCCTGTGCAGCCTCCGGAT
TCACCTTTCCGACTGCTGAGATGCTGTGGGTCCGCAAGGCTCCAGGGAAGGGTCTAGAGTGGGTCTCATCTATTTCGGC
TAGTGGTGGTTCTACATACTACGCAGACTCCGTGAAGGGCCGGTTCACCATCTCCCGCGACAATTCCAAGAACACGCTG
TATCTGCAAATGAACAGCCTGCGTGCCGAGGACGCCGCGGTATATTACTGTGCGAAAGAGCCGGTGAGTTATGTGGCGA
CGTTTGACTACTGGGGTCAGGGAACCCTGGTCACCGTCTCGAGC (SEQ ID NO: 1149)
BMS3h-217-1
AACATCCAGATGACCCAGTCTCCATCCTCCCTGTCTGCATCTGTAGGAGACCGTGTCACCATCACTTGCCGGGCAAGTC
ATTTTATTGGTACTCTGTTAACTTGGTACCAGCATAAACCAGGGAAAGCCCCTAAGCTCCTGATCACTTATGGTTCCTT
GTTGCAAAGTGGGGTCCCATCACGTTTCAGTGGCAGTGGATCTGGGACAGATTTCACTCTCACCATCAGCAGTCTGCAA
CCTGAAGATTTTGCTACGTACTACTGTGGTCAGGGGGTGCTGTGGCCTGCGACGTTCGGCCAAGGGACCAAGGTGGAAA
TCAAACGG (SEQ ID NO: 1150)
BMS3h-217-2
GACATCCAGATGACCCAGTCTCCATCCTCCCTGTCTGCATCTGTAGGAGACCGTGTCACCATCACTTGCCGGGCAAGTC
ATTTTATTGGTACTCTGTTATCTTGGTACCAGCAGAAACCACGGAAAGCCCCTAAACTCCTGATCACTTATGGTTCCTT
GTTGCAAAGTGGGGTCCCATCACGTTTCAGTGGCAGTGGATCTGGGACAGATTTCACTCTCACCATCAGCAGTCTGCAT
CCTGAAGATTTTGCTACGTACTACTGTGGTCAGGGGGTGCTGTGGCCTCCGACGTTCGGTCAAGGGACCAAGGTGGAAA
TCAAACGG (SEQ ID NO: 1151)
BMS3h-217-3
GACATCCAGATGACCCAGTCTCCGTCCTCCCTGACTGCATCTGTAGGAGACCGTGTCACCATCACTTGCCGGGCAAGTC
ATTTTATTGGTACTCTGTTATCTTGGTACCAGCAGAAACCAGGGAAAGCCCCTAAGCTCCTGGTCACTTATGGTTCCTT
GTTGCAAAGTGGGGTCCCATCACGTTTCAGTGGCAGTGGATCTGGGACAGATTTCACTCTCACCATCAGCAATCTGCAA
CCTGAAGATTTTGCTACGTACTACTGTGGTCAGGGGGTGCTGTGGCCTCCTACGTTCGGCCAAGGGACCAAGGTGGAAA
ACATACGG (SEQ ID NO: 1152)
BMS3h-217-4
GACATCCAGATGACCCAGTCTCCATCCTCCCTGTCTGCATCTGTAGGAGACCGTGTCACCATCACTTGCCGGGCAAGTC
ATTTTATTGCTACTCTGTTATCTTGGTACCAGCAGAAACCAGGGAAAGCCCCTAAGCTCCTGATCACTTATGGTTCCTT
GTTGCAAAGTGGGGTCCCATCACGTTTCAGTGGCAGTGGATCTGGGACAGATTTCACTCTCACCATCAGCAGTCTGCAA
CCTGAAGATTTTGCTACGTACTACTGTGGTCAGGGGGTGCTGTGGCCTCCGACGTTCGGCCAAGGGACCAAGGTGGAAA
TCAAACGG (SEQ ID NO: 1153)
BMS3h-217-5
GACATCCAGATGACCCAGTCTCCATCCTTCCTGTCTGCATCTGTAGGAGACCGTGTCACCATCACTTGCCGGGCAAGTC
ATTTTATTGCTACTCTGTTATCTTGGTACCAGCAGAAACCAGGGAAAGCCCCTAAGCTCCTGATCACTTATGGTTCCTT
GTTGCAAAGTGGGGTCCCATCACGTTTCAGTGGCAGTGGATCTGGGACAGATTTCACTCTCACCATCAGCAGTCTGCAA
CCTGAAGATTTTGCTACGTACTACTGTGGTCAGGGGGTGCTGTGGCCTCCGACGTTCGGCCAAGGGACCAAGGTGGAAA
TCAAACGG (SEQ ID NO: 1154)
BMS3h-217-6
GACATCCAGATGACCCAGTCTCCATCCTCCCTGTCTGCATCTGTAGGAGACCGTGTCACCATCACTTGCCGGGCAAGTC
ATTTTATTGGTACTCTGTTATCTTGGTACCAGCAGAAACCAGGGAAAGCCACTAAGCTCCTGATCACTTATGGTTCCTT
GTTGCAAAGTGGGGTCCCATCACGTTTCAGTGGCAGTGGATCTGGGACAGATTTCACTCTCACCATCAGCAGTCTGCAA
CCTGAAGACTTTGCTACGTACTACTGTGGTCAGGGGGTGCTGTGGCCCCCGACGTTCGGCCAGGGGACCAAGGTGGAAA
TCAAACGT (SEQ ID NO: 1155)
BMS3h-217-7
GACATCCAGATGACCCAGTCTCCATCCTCCCTGTCTGCATCTGTAGGAGACCGTGTCACCATCACTTGCCGGGCAAGTC
ATTTTATTGGTTCTCTGTTATCTTGGTACCAGCATAAACCAGGGAAAGCCCCTAAGCTCCTGATCACTTATGGTTCCTT
GTTGCAAAGTGGGGTCCCATCACGTTTCAGTGGCAGTGGATCTGGGACAGATTTCACTCTCACCATCAGCAGTCTGCAA
CCTGAAGATTTTGCTACGTACTACTGTGGTCAGGGGGTGCTGTGGCCTGCGACGTTCGGCCAAGGGACCAAGGTGGAAA
TCAAACGG (SEQ ID NO: 1156)
BMS3h-217-8
GACATCCAGATGACCCAGTCTCCATCCTCCCTGTCTGCATCTGTAGGAGACCGTGTCACCATCACTTGCCGGGCAAGTC
ATTTTATTGGTACTCTGTTATCTTGGTACCAGCATAAACCAGGGAAAGCCCCTAAGCTCCTGATCACTTATGGTTCCTT
GTTGCAAAGTGGGGTCCCATCACGTTTCAGTGGCAGTGGATCTGGGACAGATTTCACTCTCACCATCAGCAGTCTGCAA
CCTGAAGATTTTGCTACGTACTACTGTGGTCAGGGGGTGCTGTGGCCTGCGACGTTCGGCCAAGGGACCAAGGTGGAAA
TCAAACGG (SEQ ID NO: 1157)
BMS3h-217-9
GACATCCAGATGACCCAGTCTCCATCCTCCCTGTCTGCATCTGTAGGAGACCGTGTCACCATCACTTGCCGGGCAAGTC
ATTTTATTGGTACTCTGTTATCTTGGTACCAGCATAAACCAGGGAAAGCCCCTAAGCTCCTGATCACTTATGGTTCCAT
GTTGCAAAGTGGGGTCCCATCACGTTTCAGTGGCAGTGGATCTGGGACAGATTTCACTCTCACCATCAGCAGTCTGCAA
CCTGAAGATTTTGCAACGTACTACTGTGGTCAGGGGGTGCTGTGGCCTGCGACGTTCGGCCAAGGGACCAAGGTGGAAA
TCAAACGG (SEQ ID NO: 1158)
BMS3h-217-10
GACATCCAGATGACTCAGTCTCCATCCTCCCTGTCTGCATCTGTAGGAGACCGAGTCACCATCACTTGCCGGGCAAGTC
ATTTTATTGGTACTCTGTTATCCTGGTACCAGCATAAACCAGGGAAAGCCCCTAAGCTCCTGATCACCTATGGTTCCTT
GTTGCAAAGTGGGGTCCCATCACGTTTCAGTGGCAGTGGATCTGGGACAGAATTCACTCTCACCATCAGCAGTCTGCAA
CCTGAAGATTTTGCTACGTACTACTGTGGTCAGGGAGTGCTGTGGCCTGCGACGTTCGGCCAAGGGACCAAGGTGGAAA
TCAAACGG (SEQ ID NO: 1159)
BMS3h-217-11
GACATCCAGATGACCCAGTCTCCATCCTCCCTGACTGCATCTGTAGGAGACCGTGTCACCATCACTTGCCGGGCAAGTC
ATTTTATTGGTACTCTGTTATCTTGGTACCAGCATAAACCAGGGAAAGCCCCTAAGCTCCTGATCACTTATGGTTCCTT
GTTGCAAAGTGGGGTCCCATCACGTTTCAGTGGCAGTGGATCTGGGACAGAATTCACTCTCACCATCAGCAGTCTGCAA
CCTGAAGATTTTGCTACGTACTACTGTGGTCAGGGGGTGCTGTGGCCTGCGACGTTCGGCCAAGGGACCAAGGTGGAAA
TCAAACGG (SEQ ID NO: 1160)
BMS3h-217-12
AACATCCAGATGACCCAGTCTCCATCCTCCCTGTCTGCATCTGTAGGAGACCGTGTCACCATCACTTGCCGGGCAAGTC
ATTTTATTGGTACTCTGTTATCTTGGTACCAGCATAAACCAGGGAAAGCCCCTAAGCTCCTGATCACTTATGGTTCCTT
GTTGCAAAGTGGGGTCCCATCACGTTTCAGTGGCAGTGGATCTGGGACAGATTTCACTCTCACCATCAGCAGTCTGCAA
CCTGAAGATTTTGCTACGTACTACTGTGGTCAGGGGGTGCTGTGGCCTGCGACGTTCGGCCAAGGGACCAAGGTGGAAA
TCAAACGG (SEQ ID NO: 1161)
BMS3h-217-13
GACATCCAGATGACCCAGTCTCCATCCTCCCTGTCTGCATCTGTAGGAGACCGTGTCACCATCAATTGCCGGGCAAGTC
ATTTTATTGGTACTCTGTTATCTTGGTACCAGCATAAACCAGGGAAAGCCCCTAAGCTCCTGATCACTTATGGTTCCTT
GTTGCAAAGTGGGGTCCCATCACGTTTCAGTGGCAGTGGATCTGGGACAGATTTCACTCTCACCATCAGCAGTCTGCAA
CCTGAAGATTTTGCTACGTACTACTGTGGTCAGGGGGTGCTGTGGCCTGCGACGTTCGGCCAAGGGACCAAGGTGGAAA
TCAAACGG (SEQ ID NO: 1162)
BMS3h-217-14
GACATCCAGTTGACCCAGTCACCATCCTCCCTGTCTGCATCTGTAGGAGACCGTGTCACCATCACTTGCCGGGCAAGTC
ATTTTATTGGTACTCTGTTATCTTGGTACCAGCAGAAACCAGGGAAAGCCACTAAGCTCCTGATCACTTATGGTTCCTT
GTTGCAAAGTGGGGTCCCATCACGTTTCAGTGGCAGTGGATCTGGGACAGATTTCACTCTCACCATCAGCAGTCTGCAA
CCTGAAGATTTTGCTACGTACTACTGTGGTCAGGGGGTGCTGTGGCCTCCGACGTTCGGCCAAGGGACCAAGGTGGAAA
TCAAACGG (SEQ ID NO: 1163)
BMS3h-217-15
GACATCCAGATGACACAGTCTCCATCCTCCCTGTATGCATCTGTAGGAGACCGTGTCACCATCACTTGCCGGGTAAGTC
ATTTTATTGGTACTCTGTTATCTTGGTACCAGCAGAAACCAGGGAAAGCCCCTAAGCTCCTGATCACTTATGGTTCCTT
GTTGCAAAGTGGGGTCCCATCACGTTTCAGTGGCAGTGGATCTGGGACAGATTTCACTCTCAGCATCAGCAGTCTGCAA
CCTGAAGATTTTGCTACGTACTACTGTGGTCAGGGGGTGCTGTGGCCCCCGACGTTCGGACAAGGGACCAAGGTGGAAA
TCAAACAG (SEQ ID NO: 1164)
BMS3h-217-16
GACATTCAGATGACCCAGTCTCCATCCTCCCTGTCTGCATCTGTAGGAGACCGTGTCACCATCACTTGCCGGGCAAGTC
ATTTTATTGGTACTCTGTTATCTTGGTACCAGCAGAAACCAAGGAAAGCCCCTAAGCTCCTGATCACTTATGGTTCCTT
GTTGCAAAGTGGGGTCCCATCACGTTTCAGTGGCAGTGGATCTGGGACAGATTTCACTCTCACCATCAGCAGTCTGCAA
CCTGAAGATTTTGCTACGTACTACTGTGGTCAGGGGGTGCTGTGGCCTCCGACGTTCGGCCAAGGGACCAAGGTGGAAA
TCAAACGG (SEQ ID NO: 1165)
BMS3h-217-17
GACATCCAGATTATCCAGTCTCCATCCTCCCTTTCTGCATCTGTAGGAGACCGTGTCACCATCACTTGCCGGGCAAGTC
ATTTTATTGGTACTCTGTTATCTTGGTACCAGCAGAAACCAGGGAAAGCCCCTAAGCTCCTGATCACTTATGGTTCCTT
GTTGCAAAGTGGGGTCCCATCACGTTTCAGTGGCAGTGGATCTGGGACAGATTTCACTCTCACCATCAGCAGTCTGCAA
CCTGAAGATTTTGCTACGTACTACTGTGGTCAGGGGGTGCTGTGGCCTCCGACGTTCGGCCAAGGGACCAAGGTGGAAA
TCAAACGG (SEQ ID NO: 1166)
BMS3h-217-18
GACATCCAGATGACCCAGTCTCCATCCTCCCTGTCTGCATCTGTAGGAGACCGTGTCACCATCACTTGCCGGGCAAGTC
ATTTTATTGGTACTCTGTTATCTTGGTACCAGCTGAAACCAGGGAAAGCCCCTAAGCTCCTGATCACTTATGGTTCCTT
GTTGCAAAGTGGGGTCCCATCACGTTTCAGTGGCAGTGGATCTGGGACAGATTTCACTCTCACCATCAGCAGTCTGCAA
CCTGAAGATTTTGCTACGTACTACTGTGGTCAGGGGGTGCTGTGGCCTGCGACGTTCGGCCAAGGGACCAAGGTGGAAA
TCAAACGG (SEQ ID NO: 1167)
BMS3h-217-19
GACATCCAGATGACCCAGTCTCCATCCTCCCTGTCTGCATCTGTAGGAGACCGTGTCACCATCACTTGCCGGGCAAGTC
ATTTTATTGGTACTCTGTTATCTTGGTACCAGCTGAAACCAGGGAAAGCCCCAAAGCTCCTGATCACTTATGGTTCCTG
GTTGCAAAGTGGGGTCCCATCACGTTTCAGTGGCAGTGGATCTGGGACAGATTTCACTCTCACCATCAGCAGTCTGCAA
CCTGAAGATTTTGCTACGTACTACTGTGGTCAGGGGGTGCTGTGGCCTGCGACGTTCGGCCAAGGGACCAAGGTAGAAA
ACAAACGG (SEQ ID NO: 1168)
BMS3h-217-20
GACATCCAGATGACCCAGTCTCCATCCTCCCTGTCTGCATCTGTAGGAGACCGTGTCACCATCACTTGCCGGGCAAGTC
ATTTTATTGGTACTCTGTTATCTTGGTACCAGCTTAAACCAGGGAAAGCCCCTAAGCTCCTGATCACTTATGGTTCCTT
GTTGCAACGTGGGGTCCCATCACGTTTCAGTGGCAGTGGATCTGGGACAGATTTCACTCTCACCATCAGCAGTCTGCAA
CCTGAAGATTTTGCTACGTACTACTGTGGTCAGGGGGTGCTGTGGCCTGCGACGTTCGGCCAAGGGACCAAGGTGGAAA
TCAAACGG (SEQ ID NO: 1169)
BMS3h-217-21
GACATCCAGATGACCCAGGCTCCATCCTCCCTGTCTGCATCTGTAGGAGACCGTGTCACCATCACTTGCCGGGCAAGTC
ATTTTATTGGTACTCTGTTATCTTGGTACCAGCTGAAACCAGGGAAAGCCCCTAAGCTCCTGATCACTTATGGTTCCTT
GTTGCAGAGTGGGGTCCCATCACGTTTCAGTGGTAGTGGATCTGGGACAGATTTCACTCTCACCATCAGCAGTCTGCAA
CCTGAAGATTTTGCTACGTACTACTGTGGTCAGGGGGTGCTGTGGCCTGCGACGTTCGGCCAAGGGACCAAGGTTGAAA
ACAAACGG (SEQ ID NO: 1170)
BMS3h-217-22
GACATCCAGATGACCCAGTCTCCATCCTCCCTGTCTGCATCTGTAGGAGACCGTGTCACCATCACTTGCCGGGCAAGTC
ATTTTATTGGTTCTCTGTTATCTTGGTACCAGCAGAAACCAGGGAAAGCCCCAAAGCTCCTGATCACTTATGGTTCCTT
GTTGCAAAGTGGGGTCCCATCACGTTTCAGTGGCAGTGGATCTGGGACAGATTTCGCTCTCACCATCAGCAGTCTGCAA
CCTGAAGATTTTGCTACGTACTACTGTGGTCAGGGGGTGCTGTGGCCTGCGACGTTCGGCCAAGGGACCAAGGTGGAAA
TCAAACGG (SEQ ID NO: 1171)
BMS3h-217-23
GACATCCAGATGACCCAGTCTCCATCCTCCCTGTCTGCATCTGTAGGAGACCGTGTCACCATCACTTGCCGGGCAAGTC
ATTTTATTGGTAGTCTGTTATCTTGGTACCAGGTGAAACCAGGGAAAGCCCCTAAGCTCCTGATCACTTATGGTTCCTT
GTTGCAAAGTGGGGTCCCATCACGTTTCAGTGGCAGTGGATCTGGGACAGATTTCACTCTCACCATCAGCAGTCTGCAA
CCTGAAGATTTTGCTACGTACTACTGTGGTCAGGGGGTGCTGTGGCCTGCGACGTTCGGCCAAGGGACAACGGTGGAAA
TCAAACGG (SEQ ID NO: 1172)
BMS3h-217-24
GACATCCTGATGACCCAGTCTCCATCCTCCCTGTCTGCATCTGTAGGAGACCGTGTCACCATCACTTGCCGGGCAAGTC
ATTTTATTGGTAGTCTGTTATCTTGGTACCAGCAGAAACCAGGGAAAGCCCCTAAGCTCCTGATCACTTATGGTTCCTT
GTTGCAAAGTGGGGTCCCATCACGTTTCAGTGGCAGTGGATCTGGGACAGATTTCACTCTCACCATCAGCAGTCTGCAA
CCTGAAGATTTTGCTACGTACTACTGTGGTCAGGGGGTGCTGTGGCCTGCGACGTTCGGCCAAGGGACCAAGGTGGAAA
TCAAACGG (SEQ ID NO: 1173)
BMS3h-217-25
GACATCCAGATGACCCAGTCTCCATCCTCCCTGTCTGCATCTGTAGGAGACCGTGTCACCATCACTTGCCGGGCAAGTC
ATTTTATTGGTACTCTGGTATCTTGGTACCAGCAGAAACCGGGGAAAGCCCCTAAGCTCCTGATCACTTATGGTTCCTT
GTTGCAAAGTGGGGTCCCATCACGTTTCAGTGGCAGTGGATCTGGGACAGATTTCACTCTCACCATCAGCAGTCTGCAA
CCTGAAGATTTTGCTACGTACTACTGTGGTCAGGGGGTGCTGTGGCCTGCGACGTACGGCCAAGGGACCAAGGTGGAAA
TCAAACGG (SEQ ID NO: 1174)
BMS3h-217-26
GACATCCAGATGACCCAGTCTCCATCCTCTCTGTCTGCATCTGTAGGAGACCGTGTCACCATCACTTGCCGGGCAAGTC
ATTTTATTGGTACTCTGGTATCTTGGTACCAGCAGAAACCAGGGAAAGCCCCTAAGCTCCTGATCACTTATGGTTCCTT
GTTGCAAAGTGGGGTCCCATCACGTTTCAGTGGCAGTGGATCTGGGACAGATTTCACTCTCACCATCAGCAGTCTGCAA
CCTGAAGATTTTGCTACGTACTACTGTGGTCAGGGGGTGCTGTGGCCTGCGACTTTCGGCCAAGGGACCAAGGTGGAAA
ACAAACGG (SEQ ID NO: 1175)
BMS3h-217-27
GACATCAAGATGACCCAGTCTCCATCCTCCCTGTCTGCATCTGTAGGAGACCGTGTCACCATCACTTGCCGGGCGAGTC
ATTTTATTGGTACTCTGGTATCTTGGTACCAGCAGAAACCAGGGAAAGCCCCAAAGCTCCTGATCACTTATGGTTCCAT
GTTGCAAAGTGGGGTCCCATCACGTTTCAGTGGCAGTGGATCTGGGACAGATTTCACTCTCACCATCAGCAGTCTGCAA
CCTGAAGATTTTGCTACGTACTACTGTGGTCAGGGGGTGCTGTGGCCTGCGACGTTCGGCCAAGGGACCAAGGTGGAAA
TCAAACGG (SEQ ID NO: 1176)
BMS3h-217-28
GACATCCAGATGACCCAGTCTCCATCCTCCCTGTCTGCATCTGTAGGAGACCGTGTCACCATCACTTGCCAGGCAAGTC
ATTTTATTGGTACTCTGGTATCCTGGTACCAGCAGAAACCAGGGAAAGCCCCTAAGCTCCTGATCACTTATGGTTCCTT
GTTGCAAAGTGGGGTCCCATCACGTTTCAGTGGCAGTGGATCTGGGACAGATTTCACTCTCACCATCAGCAGTCTGCAA
CCTGAAGATTTTGCTACGTACTACTGTGGTCAGGGGGTGCTGTGGCCCGCGACGTTCGGCCAAGGGACCAAGGTGGAAA
TCAAACGG (SEQ ID NO: 1177)
BMS3h-217-29
GACATCCAGATGACCCAGTCTCCATCCTCCCTGTCTGCATCTGTAGGAGACCGTGTCACCATCACTTGCCGGGCAAGTC
ATTTTATTGGTACTCTGTTATCTTGGTACCAGCAGAAACCAGGGAAAGCCCCTAAGCTCCTGATCACTTATGGTTCCTG
GTTGCAAAGTGGGGTCCCATCACGTTTCAGTGGCAGTGGATCTGGGACAGATTTCACTCTCACCATCAGCAGTCTGCAA
CCTGAAGATTTTGCTACGTACTACTGTGGTCAGGGGGTGCTGTGGCCTGCGACGTTCGGCCAAGGGACCAAGGTGGAAA
TCAAACGG (SEQ ID NO: 1178)
BMS3h-217-30
GACATCCAGATGACCCAGTCTCCATCCTCCCTGTCTGCATCTGTTGGAGACCGTGTCACCATCACTTGCCGGGCAAGTC
ATTTTATTGGTACTCTGTTATCTTGGTACCAGCTGAAACCAGGGAAAGCCCCTAAGCTCCTGATCACTTATGGTTCCTG
GTTGCAAAGTGGGGTCCCATCACGTTTCAGTGGCAGTGGATCTGGGACAGATTTCACTCTCACCATCAGCAGTCTGCAA
CCTGAAGATTTTGCTACGTACTACTGTGGTCAGGGGGTGCTGTGGCCTGCGACGTTCGGCCAAGGGACCAAGGTGGAAA
TCAAACGG (SEQ ID NO: 1179)
BMS3h-217-31
GACATCCAGATGACCCAGTCTCCATCCTCCCTGTCTGCATCTGTAGGAGACCGTGTCACCATCACTTGCCGGGCAAGTC
ATTTTATTGGTACTCTGTTATCTTGGTACCAGCAGAAACCGGGGAAAGCCCCTAAGCTCCTGATCACTTATGGTTCCTT
GTTGCAAAGTGGGGTCCCATCACGTTTCAGTGGCAGTGGATTTGGGACAGATTTCACTCTCACCATCAGCAGTCTGCAA
CCTGAAGATTTTGCTACGTACTACTGTGGTCAGGAGGTGCTGTGGCCTGCGACGTTCGGCCAAGGGACTAAGGTGGAAA
TCAAACGG (SEQ ID NO: 1180)
BMS3h-217-32
GACATCCAGATGACCCAGTCTCCATCCTCCCTGTCTGCATCTGTAGGAGACCGTGTCTCCATCACTTGCCGAGCAAGTC
ATTTTATTGGTACTCTGTTATCTTGGTACCAGCAGAAACCAGGGAAAGCCCCTAAGCTCCTGATCACTTATGGTTCCTT
GTTGCAAAGTGGGGTCCCATCACGTTTCAGTGGCAGTGGATTTGGGACAGATTTCACTCTCACCATCAGCAGTCTGCAA
CCTGAAGATCTTGCTACGTACTACTGTGGTCAGGAGGTGCTGTGGCCTGCGACGTTCGGCCAAGGGACCAAGGTGGAAA
TCAAACGG (SEQ ID NO: 1181)
BMS3h-217-33
GACATCCAGATGACCCAGTCTCCATCCTCCCTGTCTGCATCTGTAGGAGACCGTGTCACCATCACTTGCCAGGCAAGTC
ATTTTATTGGTACTCTGTTATCTTGGTACCAGCAGAAACCAGGGAAAGCCCCTAAGCTCCTGATCACTTATGGTTCCTT
GTTGCAAAGTGGGGTCCCATCACGTTTCAGTGGCAGTGGATTTGGGACAGATTTCACTCTCACCATCAGCAGTCTGCAA
CCCGAAGATTTTGCTACGTACTACTGTGGTCAGGAGGTGCTGTGGCCTGCGACGTTCGGCCAAGGGACCAAGGTGGAAA
TCAAACGG (SEQ ID NO: 1182)
BMS3h-217-34
GACATCCAGATGACCCAGTCTCCATCCTCCCTGTCTGCATCAGTAGGAGACCGTGTCACCATCACTTGCCGGGCAAGTC
ATTTTATTGGTACTCTGTTATCTTGGTACCAGCAGAAACCTGGGAAAGCCCCTAAGCTCCTGATCACTTATGGTTCCTT
GTTGCAAAGTGGGGTCCCATCACGTTTCAGTGGCAGTGGATTTGGGACAGAATTCACTCTCACCATCGGCAGTCTGCAA
CCTGAAGATTTTGCTACGTACTACTGTGGTCAGGGGGTGCTGTGGCCTGCGACGTTCGGCCAAGGGACCAAGGTGGAAA
TCAAACGG (SEQ ID NO: 1183)
BMS3h-217-35
GACATCCAGATGACCCAGTCACCATCCTCCCTGTCTGCATCTGTAGGAGACCGTGTCACCATCACTTGCCGGGCAAGTC
ATTTTATTGGTACTCTGTTATCTTGGTACCAGCAGAAACCAGGGAAAGCCACTAAGCTCCTGATCACTTATGGTTCCTT
GTTGCAAAGTGGGGTCCCATCACGTTTCAGTGGCAGTGGATCTGGGACAGATTTCACTCTCACCATCAGCAGTCTGCAA
CCTGAAGATTTTGCTACGTACTACTGTGGTCAGGGGGTGCTGTGGCCTCCGACGTTCGGCCAAGGGACCAAGGTGGAAA
TCAAACGG (SEQ ID NO: 1184)
BMS3h-217-2301
GACATCCAGATGACCCAGTCTCCATCCTCCCTGTCTGCATCTGTAGGAGACCGTGTCACCATCACTTGCCGGGCAAGTC
ACTTCATTGCCAGTCTGTTATCTTGGTACCAGGTGAAACCAGGGAAAGCCCCTAAGCTCCTGATCACTTATGGTTCCTT
GTTGCAAAGTGGGGTCCCATCACGTTTCAGTGGCAGTGGATCTGGGACAGATTTCACTCTCACCATCAGCAGTCTGCAA
CCTGAAGATTTTGCTACGTACTACTGTGGTCAGGGGGTGCTGTGGCCTGCGACGTTCGGCCAAGGGACAACGGTGGAAA
TCAAACGG (SEQ ID NO: 1185)
BMS3h-217-2302
GACATCCAGATGACCCAGTCTCCATCCTCCCTGTCTGCATCTGTAGGAGACCGTGTCACCATCACTTGCCGGGCAAGTC
ATTTCATTGCCCAGCTGTTATCTTGGTACCAGGTGAAACCAGGGAAAGCCCCTAAGCTCCTGATCACTTATGGTTCCTT
GTTGCAAAGTGGGGTCCCATCACGTTTCAGTGGCAGTGGATCTGGGACAGATTTCACTCTCACCATCAGCAGTCTGCAA
CCTGAAGATTTTGCTACGTACTACTGTGGTCAGGGGGTGCTGTGGCCTGCGACGTTCGGCCAAGGGACAACGGTGGAAA
TCAAACGG (SEQ ID NO: 1186)
BMS3h-217-2303
GACATCCAGATGACCCAGTCTCCATCCTCCCTGTCTGCATCTGTAGGAGACCGTGTCACCATCACTTGCCGGGCAAGTC
ATTTCATTGCCCAGCTGTTATCTTGGTACCAGGTGAAACCAGGGAAAGCCCCTAAGCTCCTGATCACTTATGGTTCCTT
GTTGCAAAGTGGGGTCCCATCACGTTTCAGTGGCAGTGGATCTGGGACAGATTTCACTCTCACCATCAGCAGTCTGCAA
CCTGAAGATTTTGCTACGTACTACTGTGGTCAGGGGGTGCTGTGGCCTGCGACGTTCGGCCAAGGGACAACGGTGGAAA
TCAGACGG (SEQ ID NO: 1187)
BMS3h-217-2304
GACATCCAGATGACCCAGTCTCCATCCTCCCTGTCTGCATCTGTAGGAGACCGTGTCACCATCACTTGCCGGGCAAGTC
ATTACATTGCCTCCCTGTTATCTTGGTACCAGGTGAAACCAGGGAAAGCCCCTAAGCTCCTGATCACTTATGGTTCCTT
GTTGCAGAGTGGGGCCCCATCACGTTTCAGTGGCAGTGGATCTGGGACAGATTTCACTCTCACCATCAGCAGTCTGCAA
CCTGAAGATTTTGCTACGTACTACTGTGGTCAGGGGGTGCTGTGGCCTGCGACGTTCGGCCAAGGGACAACGGTGGAAA
TCAAACGG (SEQ ID NO: 1188)
BMS3h-217-2305
GACATCCAGATGACCCAGTCTCCATCCTCCCTGTCTGCATCTGTAGGAGACCGTGTCACCATCACTTGCCGGGCAAGTC
ATTTTATTGGTAGTCTGTTATCTTGGTACCAGGTGAAACCAGGGAAAGCCCCTAAGCTCCTGATCACTTGGGCCTCCTA
CTTGCAAAGTGGGGTCCCATCACGTTTCAGTGGCAGTGGATCTGGGACAGATTTCACTCTCACCATCAGCAGTCTGCAA
CCTGAAGATTTTGCTACGTACTACTGTGGTCAGGGGGTGCTGTGGCCTGCGACGTTCGGCCAAGGGACAACGGTGGAAA
TCAAACGG (SEQ ID NO: 1189)
BMS3h-217-2306
GACATCCAGATGACCCAGTCTCCATCCTCCCTGTCTGCATCTGTAGGAGACCGTGTCACCATCACTTGCCGGGCAAGTC
ATTTTATTGGTAGTCTGTTATCTTGGTACCAGGTGAAACCAGGGAAAGCCCCTAAGCTCCTGATCACTTGGACGTCCTA
CTTGCAAAGTGGGGTCCCATCACGTTTCAGTGGCAGTGGATCTGGGACAGATTTCACTCTCACCATCAGCAGTCTGCAA
CCTGAAGATTTTGCTACGTACTACTGTGGTCAGGGGGTGCTGTGGCCTGCGACGTTCGGCCAAGGGACAACGGTGGAAA
TCAAACGG (SEQ ID NO: 1190)
BMS3h-217-2307
GACATCCAGATGACCCAGTCTCCATCCTCCCTGTCTGCATCTGTAGGAGACCGTGTCACCATCACTTGCCGGGCAAGTC
ATTTTATTGGTAGTCTGTTATCTTGGTACCAGGTGAAACCAGGGAAAGCCCCTAAGCTCCTGATCACTTGGTCGTCCTA
CTTGCAAAGTGGGGTCCCATCACGTTTCAGTGGCAGTGGATCTGGGACAGATTTCACTCTCACCATCAGCAGTCTGCAA
CCTGAAGATTTTGCTACGTACTACTGTGGTCAGGGGGTGCTGTGGCCTGCGACGTTCGGCCAAGGGACAACGGTGGAAA
TCAAACGG (SEQ ID NO: 1191)
BMS3h-217-2308
GACATCCAGATGACCCAGTCTCCATCCTCCCTGTCTGCATCTGTAGGAGACCGTGTCACCATCACTTGCCGGGCAAGTC
ATTTTATTGGTAGTCTGTTATCTTGGTACCAGGTGAAACCAGGGAAAGCCCCTAAGCTCCTGATCACTTGGGGGTCCTG
GTTGCAAAGTGGGGTCCCATCACGTTTCAGTGGCAGTGGATCTGGGACAGATTTCACTCTCACCATCAGCAGTCTGCAA
CCTGAAGATTTTGCTACGTACTACTGTGGTCAGGGGGTGCTGTGGCCTGCGACGTTCGGCCAAGGGACAACGGTGGAAA
TCAAACGG (SEQ ID NO: 1192)
BMS3h-217-2309
GACATCCAGATGACCCAGTCTCCATCCTCCCTGTCTGCATCTGTAGGAGACCGTGTCACCATCACTTGCCGGGCAAGTC
ATTTTATTGGTAGTCTGTTATCTTGGTACCAGGTGAAACCAGGGAAAGCCCCTAAGCTCCTGATCACTTGGGCGTCCTG
GTTGCAAAGTGGGGTCCCATCACGTTTCAGTGGCAGTGGATCTGGGACAGATTTCACTCTCACCATCAGCAGTCTGCAA
CCTGAAGATTTTGCTACGTACTACTGTGGTCAGGGGGTGCTGTGGCCTGCGACGTTCGGCCAAGGGACAACGGTGGAAA
TCAAACGG (SEQ ID NO: 1193)
BMS3h-217-2310
GACATCCAGATGACCCAGTCTCCATCCTCCCTGTCTGCATCTGTAGGAGACCGTGTCACCATCACTTGCCGGGCAAGTC
ATTTTATTGGTAGTCTGTTATCTTGGTACCAGGTGAAACCAGGGAAAGCCCCTAAGCTCCTGATCACTTGGAGCTCCTG
GTTGCAAAGTGGGGTCCCATCACGTTTCAGTGGCAGTGGATCTGGGACAGATTTCACTCTCACCATCAGCAGTCTGCAA
CCTGAAGATTTTGCTACGTACTACTGTGGTCAGGGGGTGCTGTGGCCTGCGACGTTCGGCCAAGGGACAACGGTGGAAA
TCAAACGG (SEQ ID NO: 1194)
BMS3h-217-2311
GACATCCAGATGACCCAGTCTCCATCCTCCCTGTCTGCATCTGTAGGAGACCGTGTCACCATCACTTGCCGGGCAAGTC
ATTGGATTGCCCAGCTGTTATCTTGGTACCAGGTGAAACCAGGGAAAGCCCCTAAGCTCCTGATCACTTATGGTTCCTT
GTTGCAAAGTGGGGTCCCATCACGTTTCAGTGGCAGTGGATCTGGGACAGATTTCACTCTCACCATCAGCAGTCTGCAA
CCTGAAGATTTTGCTACGTACTACTGTGGTCAGGGGGTGCTGTGGCCTGCGACGTTCGGCCAAGGGACAACGGTGGAAA
TCAAACGG (SEQ ID NO: 1195)
BMS3h-217-2312
GACATCCAGATGACCCAGTCTCCATCCTCCCTGTCTGCATCTGTAGGAGACCGTGTCACCATCACTTGCCGGGCAAGTC
ATTTTATTGGTTCGCTCTTACGCTGGTACCAGGTGAAACCAGGGAAAGCCCCTAAGCTCCTGATCACTTATGGTTCCTT
GTTGCAAAGTGGGGTCCCATCACGTTTCAGTGGCAGTGGATCTGGGACAGATTTCACTCTCACCATCAGCAGTCTGCAA
CCTGAAGATTTTGCTACGTACTACTGTGGTCAGGGGGTGCTGTGGCCTGCGACGTTCGGCCAAGGGACAACGGTGGAAA
TCAAACGG (SEQ ID NO: 1196)
BMS3h-217-2313
GACATCCAGATGACCCAGTCTCCATCCTCCCTGTCTGCATCTGTAGGAGACCGTGTCACCATCACTTGCCGGGCAAGTC
ATCGGATTGCCCAGCTGTTATCTTGGTACCAGGTGAAACCAGGGAAAGCCCCTAAGCTCCTGATCACTTATGGTTCCTT
GTTGCAAAGTGGGGTCCCATCACGTTTCAGTGGCAGTGGATCTGGGACAGATTTCACTCTCACCATCAGCAGTCTGCAA
CCTGAAGATTTTGCTACGTACTACTGTGGTCAGGGGGTGCTGTGGCCTGCGACGTTCGGCCAAGGGACAACGGTGGAAA
TCAAACGG (SEQ ID NO: 1197)
BMS3h-217-2314
GACATCCAGATGACCCAGTCTCCATCCTCCCTGTCTGCATCTGTAGGAGACCGTGTCACCATCACTTGCCGGGCAAGTC
ATTACATTGCCTCCCTGTTATCTTGGTACCAGGTGAAACCAGGGAAAGCCCCTAAGCTCCTGATCACTTATGGTTCCTT
GTTGCAAAGTGGGGTCCCATCACGTTTCAGTGGCAGTGGATCTGGGACAGATTTCACTCTCACCATCAGCAGTCTGCAA
CCTGAAGATTTTGCTACGTACTACTGTGGTCAGGGGGTGCTGTGGCCTGCGACGTTCGGCCAAGGGACAACGGTGGAAA
TCAAACGG (SEQ ID NO: 1198)
BMS3h-217-2315
GACATCCAGATGACCCAGTCTCCATCCTCCCTGTCTGCATCTGTAGGAGACCGTGTCACCATCACTTGCCGGGCAAGTC
ATTTTATTGGTAGTCTGTTATCTTGGTACCAGGTGAAACCAGGGAAAGCCCCTAAGCTCCTGATCCGGTTCGGCTCCTT
GTTGCAAAGTGGGGTCCCATCACGTTTCAGTGGCAGTGGATCTGGGACAGATTTCACTCTCACCATCAGCAGTCTGCAA
CCTGAAGATTTTGCTACGTACTACTGTGGTCAGGGGGTGCTGTGGCCTGCGACGTTCGGCCAAGGGACAACGGTGGAAA
TCAAACGG (SEQ ID NO: 1199)
BMS3h-217-2316
GACATCCAGATGACCCAGTCTCCATCCTCCCTGTCTGCATCTGTAGGAGACCGTGTCACCATCACTTGCCGGGCAAGTC
ATTTTATTGGTAGTCTGTTATCTTGGTACCAGGTGAAACCAGGGAAAGCCCCTAAGCTCCTGATCACTTACAAGTCCTA
CTTGCAAAGTGGGGTCCCATCACGTTTCAGTGGCAGTGGATCTGGGACAGATTTCACTCTCACCATCAGCAGTCTGCAA
CCTGAAGATTTTGCTACGTACTACTGTGGTCAGGGGGTGCTGTGGCCTGCGACGTTCGGCCAAGGGACAACGGTGGAAA
TCAAACGG (SEQ ID NO: 1200)
BMS3h-217-2317
GACATCCAGATGACCCAGTCTCCATCCTCCCTGTCTGCATCTGTAGGAGACCGTGTCACCATCACTTGCCGGGCAAGTC
ATTTTATTGGTAGTCTGTTATCTTGGTACCAGGTGAAACCAGGGAAAGCCCCTAAGCTCCTGATCACTTGGGGCTCCTA
CTTGCAAAGTGGGGTCCCATCACGTTTCAGTGGCAGTGGATCTGGGACAGATTTCACTCTCACCATCAGCAGTCTGCAA
CCTGAAGATTTTGCTACGTACTACTGTGGTCAGGGGGTGCTGTGGCCTGCGACGTTCGGCCAAGGGACAACGGTGGAAA
TCAAACGG (SEQ ID NO: 1201)
BMS3h-217-2318
GACATCCAGATGACCCAGTCTCCATCCTCCCTGTCTGCATCTGTAGGAGACCGTGTCACCATCACTTGCCGGGCAAGTC
ATTTTATTTGGGGGCCCTTATCTTGGTACCAGGTGAAACCAGGGAAAGCCCCTAAGCTCCTGATCACTTATGGTTCCTT
GTTGCAAAGTGGGGTCCCATCACGTTTCAGTGGCAGTGGATCTGGGACAGATTTCACTCTCACCATCAGCAGTCTGCAA
CCTGAAGATTCTGCTACGTACTACTGTGGTCAGGGGGTGCTGTGGCCTGCGACGTTCGGCCAAGGGACAACGGTGGAAA
TCAAACGG (SEQ ID NO: 1202)
BMS3h-217-2319
GACATCCAGATGACCCAGTCTCCATCCTCCCTGTCTGCATCTGTAGGAGACCGTGTCACCATCACTTGCCGGGCAAGTC
ATTGGATTGCCACCCTGTTATCTTGGTACCAGGTGAAACCAGGGAAAGCCCCTAAGCTCCTGATCACTTATGGTTCCTT
GTTGCAAAGTGGGGTCCCATCACGTTTCAGTGGCAGTGGATCTGGGACAGATTTCACTCTCACCATCAGCAGTCTGCAA
CCTGAAGATTTTGCTACGTACTACTGTGGTCAGGGGGTGCTGTGGCCTGCGACGTTCGGCCAAGGGACAACGGTGGAAA
TCAAACGG (SEQ ID NO: 1203)
BMS3h-217-2320
GACATCCAGATGACCCAGTCTCCATCCTCCCTGTCTGCATCTGTAGGAGACCGTGTCACCATCACTTGCCGGGCAAGTC
ATTTTATTTGGGGGCCCTTATCTTGGTACCAGGTGAAACCAGGGAAAGCCCCTAAGCTCCTGATCACTTATGGTTCCTT
GTTGCAAAGTGGGGTCCCATCACGTTTCAGTGGCAGTGGATCTGGGACAGATTTCACTCTCACCATCAGCAGTCTGCAA
CCTGAAGATTTTGCTACGTACTACTGTGGTCAGGGGGTGCTGTGGCCTGCGACGTTCGGCCAAGGGACAACGGTGGAAA
TCAAACGG (SEQ ID NO: 1204)
BMS3h-217-2321
GACATCCAGATGACCCAGTCTCCATCCTCCCTGTCTGCATCTGTAGGAGACCGTGTCACCATCACTTGCCGGGCAAGTC
ATTTTATTGGTAGCCTCTTAAACTGGTACCAGGTGAAACCAGGGAAAGCCCCTAAGCTCCTGATCACTTATGGTTCCTT
GTTGCAAAGTGGGGTCCCATCACGTTTCAGTGGCAGTGGATCTGGGACAGATTTCACTCTCACCATCAGCAGTCTGCAA
CCTGAAGATTTTGCTACGTACTACTGTGGTCAGGGGGTGCTGTGGCCTGCGACGTTCGGCCAAGGGACAACGGTGGAAA
TCAAACGG (SEQ ID NO: 1205)
BMS3h-217-2322
GGCATCCAGATGACCCAGTCTCCATCCTCCCTGTCTGCATCTGTAGGAGACCGTGTCACCATCACTTGCCGGGCAAGTC
ATTTTATTGGTAGTCTGTTATCTTGGTACCAGGTGAAACCAGGGAAAGCCCCTAAGCTCCTGATCACTTACGGGTCCTG
GTTGCAAAGTGGGGTCCCATCACGTTTCAGTGGCAGTGGATCTGGGACAGATTTCACTCTCACCATCAGCAGTCTGCAA
CCTGAAGATTTTGCTACGTACTACTGTGGTCAGGGGGTGCTGTGGCCTGCGACGTTCGGCCAAGGGACAACGGTGGAAA
TCAAACGG (SEQ ID NO: 1206)

### Example 1

### Generation of Human Anti-CD40 Variable Domains BMS3h-1 Through BMS3h-225

[0105] The following example describes the generation of a series of anti-human CD40 variable domains, designated BMS3h-1 through BMS3h-225. Following recombinant expression of a repertoire of single immunoglobulin variable domains on the surface of phage, selection is performed by contacting the phage repertoire with immobilized target antigen, washing to remove unbound phage, and propagating the bound phage. This process frequently referred to as “panning.” It is applicable to the screening of single immunoglobulin variable domains, as well as other antibody fragments that can be expressed on a display library, e.g., scFv, Fab, and Fab′. Alternatively, phage may be pre-selected for the expression of properly folded member variants by panning against an immobilized generic ligand (e.g., protein A or protein L) that is only bound by folded members. This has the advantage of reducing the proportion of non-functional members, thereby increasing the proportion of members likely to bind a target antigen. Pre-selection with generic ligands is taught in WO 99/20749, for example. The screening of phage antibody libraries is generally described, for example, by Harrison et al., Meth. Enzymol. 267: 83-109 (1996).

[0106] Screening is commonly performed using purified antigen immobilized on a solid support, for example, plastic tubes or wells, or on a chromatography matrix, for example Sepharose™ (Pharmacia). Screening or selection can also be performed on complex antigens, such as the surface of cells (Marks et al., BioTechnology 11: 1145 (1993); de Kruif et al., Proc. Natl. Acad. Sci. USA 92: 3938 (1995)). Another alternative involves selection by binding biotinylated antigen in solution, followed by capture on streptavidin-coated beads.

Clones BMS3h-1 to BMS3h-69:

[0107] Three rounds of selections using decreasing concentrations of antigen (100 nM at round 1; 10 nM at round 2; 1 nM at round 3) were performed in parallel against both biotinylated human CD40 monomer (supplied by BMS, 1.5 moles biotin/mole CD40) and biotinylated human CD40-Ig (supplied by BMS, 3.3 moles biotin/mole CD40-Ig). Phage from the naïve 4G and 6G Domantis dAb libraries were combined as follows before initiating selections:

[0108] 1) 4G+6G V_{H} CDR3 lengths between 7-9 amino acids.

[0109] 2) 4G+6G V_{H} CDR3 lengths between 10-12 amino acids.

[0110] 3) 4G+6G V_{H} CDR3 lengths between 13-15 amino acids.

[0111] 4) 4G VK

[0112] 5) 6G VK

[0113] Each round of selection involved adding the desired concentration of antigen to a mixture of 750 μl of phage from one of the naïve library pools or subsequent selection output phage and 750 μl of PBS+2% Marvel (Phosphate Buffered Saline containing 2% (w/v) Marvel [Premier Foods, UK]) and incubating at room temperature for 1 hour by mixing end-over-end. The biotinylated antigen phage complex was then captured by adding 100 μl of resuspended Dynabeads® M-280 Streptavidin [Invitrogen, UK] and incubated for 5 minutes with mixing end-over-end at room temperature. The Dynabeads® were then recovered using a KingFisher magnetic separator [Thermo Fisher Scientific, UK] and washed 7×1 ml PBS+0.1% Tween 20 (PBS containing 0.1% (v/v) polyoxyethylenesorbitan monolaurate [Sigma-Aldrich, UK], PBST) followed by 1×1 ml PBS. Bound phage retained on the washed Dynabeads® were eluted by incubation with 500 μl of trypsin-PBS (50 μl of 10 mg/ml trypsin [Sigma-Aldrich, UK] dissolved in 50 mM Tris-HCl pH 7.4, 1 mM CaCl₂ added to 450 μl PBS). The phage-containing solution was recovered and 250 μl used to infect 1.75 ml of logarithmic growth phase E. coli TG1 (at an OD₆₀₀ of 0.4) for 30 minutes at 37° C. The E. coli TG1 phage infected culture was centrifuged at 11,600 g in a micro centrifuge for 1 minute. The resulting cell pellet was resuspended in 1 ml 2×TY (16 g Tryptone, 10 g Yeast Extract and 5 g NaCl in 1 litre, autoclaved for 15 minutes at 121° C.) and plated onto a 9 cm Petri dish containing TY supplemented with 15 μg/ml tetracycline. The plates were incubated overnight at 37° C. Then 2 ml of 2×TY supplemented with 15% glycerol was added to each plate, and the cells were loosened with a glass spreader and mixed thoroughly. Fifty microlitres of the scraped bacteria were used to inoculate 50 ml of 2×TY supplemented with 15 μg/ml tetracycline and grown overnight at 37° C. with shaking at 250 rpm. The overnight culture was centrifuged at 3,300 g for 15 min to pellet the bacteria. To precipitate phage, 10 ml PEG/NaCl (20% Polyethylene glycol 8000, 2.5 M NaCl) was added to 40 ml supernatant. The phage/PEG solution was mixed and left on ice for 1 h, then spun at 3,300 g for 30 min at 4° C., and the supernatant discarded. The pellet was resuspended in 2 ml PBS and spun at 11,600 g for 10 min in a micro centrifuge to remove the remaining bacterial debris. The resultant supernatant containing phage was then used for the next round of selection against the appropriate biotinylated CD40 antigen.

[0114] Monoclonal phage ELISAs were carried out following selection rounds 2 and 3. All washes were performed using 3 washes of 250 μl PBST followed by 3 washes of 250 μl PBS. The plates were coated overnight at 4° C. with 50 μl/well of 1 μg/ml NeutrAvidin (Thermo Scientific, UK) in 0.2 M carbonate-bicarbonate buffer, pH 9.4. The plates were washed and then blocked with 2% MPBS (2% w/v Marvel skimmed milk powder [Premier Foods] in PBS) for 1 hour at room temperature. The plates were then washed and incubated with 50 μl/well of 0.7 μg/ml biotinylated human CD40 in 2% MPBS. The plates were washed, and phage supernatants were added to an equal volume of 2% MPBS. The plates were then incubated for 1 hour at room temperature. The plates were washed and bound phage detected with anti-M13-HRP conjugate (GE Healthcare, UK) diluted 1:5000 in 2% MPBS and incubated for 1 hour at room temperature. The plates were washed, and the ELISA was developed using SureBlue 1-Component TMB MicroWell Peroxidase solution (KPL Inc, USA). Specific phage were identified by comparison to plates coated with NeutrAvidin but without biotinylated CD40. A MidiPrep was used to isolate dAb V-genes from pDOM4 (Domantis) round 2 and round 3 outputs and cloned into pDOM5 (Domantis). pDOM4, disclosed in WO 2007/085815, is a derivative of the Fd phage vector in which the gene III signal peptide sequence is replaced with the yeast glycolipid anchored surface protein (GAS) signal peptide (WO 2005/093074). pDOM4 also contains a c-myc tag between the leader sequence and gene III, which puts the gene III back in frame.

[0115] Binding dAbs were identified as follows. Ninety-six individual colonies (in pDOM5) were picked from each output into 200 μL Terrific Broth containing OnEx Autoinduction media (Novagen, UK) overnight at 37° C. with shaking at 250 rpm in Costar 96 Well Cell Culture Clusters (Corning Incorporated, USA). The cultures were centrifuged to pellet the cells, and the supernatants were assayed by antigen binding ELISA for CD40 binding dAbs. MaxiSorp 96 well immunoplates (Nunc, USA) were coated overnight at 4° C. with 50 μl/well of 1 μg/ml NeutrAvidin in 0.2 M carbonate-bicarbonate buffer, pH 9.4. All washes were as described for the phage ELISA. The plates were blocked for 1 hour at room temperature with 200 μl of PBS containing 1% Tween 20. The plate was then washed and incubated with 50 μl/well of 0.7 μg/ml biotinylated human CD40 in 0.1% PBST. The clarified dAb-containing culture supernatant was added to the ELISA plate with an equal volume of 0.1% PBST. The plates were incubated for 1 hour at room temperature and then washed. Bound dAb was detected using a two step process: firstly 9E10 (anti-myc IgG, Sigma-Aldrich, UK) diluted 1:2000 in 0.1% PBST was added for 1 hour at room temperature then washed, followed by anti-mouse Fc-HRP (Sigma-Aldrich, UK) diluted 1:2000 in 0.1% PBST for 1 hour at room temperature. The plates were washed, and the ELISA was developed using SureBlue 1-Component TMB MicroWell Peroxidase solution (KPL Inc, USA). The color was allowed to develop, and the colorimetric reaction was stopped by the addition of an equal volume of 1 M HCl. The ELISA plate was read at 450 nm. Specific phage were identified by comparison to plates coated with NeutrAvidin but without biotinylated CD40.

[0116] Clones specific for CD40 were tested in either the bead- or ELISA-based receptor-binding assay (RBA) to assess for inhibition of CD40 ligand binding. Domain antibodies that showed inhibition in the RBA were tested in the B-cell proliferation assay and then in a variety of other in vitro cell assays. These assays are described in greater detail below.

BMS3h-106 to -225:

[0117] BMS3h-106 to -225 were isolated from selections against biotinylated CD40 or biotinylated CD40-Fc as described for BMS3h-1 to BMS3h-69, but with the following modifications. Phage from the naïve 4G and 6G libraries were combined as follows before initiating selections:

[0118] 6) 4G V_{H} CDR3 lengths between 7-9 amino acids.

[0119] 7) 4G V_{H} CDR3 lengths between 10-12 amino acids.

[0120] 8) 4G V_{H} CDR3 lengths between 13-15 amino acids.

[0121] 9) 6G V_{H} CDR3 lengths between 7-9 amino acids.

[0122] 10) 6G V_{H} CDR3 lengths between 10-12 amino acids.

[0123] 11) 6G V_{H} CDR3 lengths between 13-15 amino acids.

[0124] 12) 4G VK

[0125] 13) 6G VK

Round one was performed at an antigen concentration of 160 nM for CD40-Fc and 100 nM for CD40. Output titres were in the range 2.0×10⁴ to 9.0×10⁷ TU/ml (functional viral titre).

[0126] For round two, enriched phage from round one were combined in pairs before using in selections:

[0127] 1) 4G+6G V_{H} CDR3 lengths between 7-9 amino acids (pools 1+4 from round 1).

[0128] 2) 4G+6G V_{H} CDR3 lengths between 10-12 amino acids (pools 2+5 from round 1).

[0129] 3) 4G+6G V_{H} CDR3 lengths between 13-15 amino acids (pools 3+6 from round 1).

[0130] 4) 4G+6G VK (pools 7+8 from round 1)

Selections were performed at an antigen concentration of 100 nM, and the antigen-phage complexes were captured using M-280 tosyl-activated Dynabeads® (Invitrogen) that had been coupled with NeutrAvidin (Thermo Fisher Scientific, UK). Output titres were in the range 6.5×10⁷ to 7.5×10⁸ TU/ml.

[0131] Round three was performed at an antigen concentration of 20 nM and, in the case of the CD40-Fc selections, in the presence of 6.7 μM free human Fc tail (BMS). Output titres were in the range 4.3×10⁷ to 1.6×10⁹ TU/ml.

[0132] Round four was performed as described for round two but at an antigen concentration of 2 nM and in the presence and absence of 500-fold excess unlabelled CD40-Fc. The addition of this competitor was made after the initial one hour incubation of the phage with the biotinylated antigen, and the mixture was then incubated overnight, as before. This competition step was included with the aim of enhancing selection of dAbs with a slower off-rate. Output titres were in the range 1.8×10⁷ to 4.4×10⁷ without competition and 1.8×10⁶ to 2.3×10⁷ TU/ml with competition.

[0133] To monitor the progress of the selections, monoclonal phage ELISAs were carried out following rounds 2 and 3. These were performed as described for BMS3h-1 to BMS3h-69. Binding dAbs were identified as described for BMS3h-1 to BMS3h-69 except that, in the case of the VK library screening, protein L was included at a final concentration of 0.8 μg/ml. Addition of protein L increased the signal strength by cross-linking the dAbs.

BMS3h-70 to -105:

[0134] BMS3h-70 to -105 were isolated from selections against antigen that had been passively adsorbed to immunotubes. Phage from the naïve 4G and 6G Domantis dAb libraries were combined as follows before initiating selections:

[0135] 1) 4G V_{H} CDR3 lengths between 7-9 amino acids.

[0136] 2) 4G V_{H} CDR3 lengths between 10-12 amino acids.

[0137] 3) 4G V_{H} CDR3 lengths between 13-15 amino acids.

[0138] 4) 6G V_{H} CDR3 lengths between 7-9 amino acids.

[0139] 5) 6G V_{H} CDR3 lengths between 10-12 amino acids.

[0140] 6) 6G V_{H} CDR3 lengths between 13-15 amino acids.

[0141] 7) 4G VK

[0142] 8) 6G VK

[0143] For the first round of selection, 1 ml of 10 μg/ml human CD40-Fc fusion (BMS) in 0.2 M carbonate-bicarbonate buffer, pH 9.4, was added to a Nunc MaxiSorp immunotube and then incubated overnight at 4° C. with rolling. The tube was then emptied and washed three times with phosphate buffered saline (PBS). The tube was then blocked by filling to the brim with MPBS and incubating for 1 h at room temperature. The tube was then emptied and washed three times with PBS. Library phage in 4 ml MPBS were added to the tube and incubated for 1 hour with rotation end-over-end at room temperature.

[0144] The tube was emptied and washed 10 times with PBST (PBS with 0.1% (v/v) Tween 20). Bound phage retained on the washed tube were eluted by incubation with 500 μl of trypsin-PBS (50 μl of 10 mg/ml trypsin [Sigma-Aldrich, UK] dissolved in 50 mM Tris-HCl pH 7.4, 1 mM CaCl₂ added to 450 μl PBS) with rotation end-over-end for 10 min at room temperature. The phage-containing solution was recovered, and 250 μl were used to infect 1.75 ml of logarithmic growth phase E. coli TG1 (at an OD₆₀₀ of 0.4) for 30 minutes at 37° C. The E. coli TG1 phage infected culture was centrifuged at 11,600 g in a microcentrifuge for 1 min, and the resulting cell pellet was re-suspended in 1 ml 2×TY (16 g Tryptone, 10 g Yeast Extract, and 5 g NaCl in 1 litre. The suspension was autoclaved for 15 minutes at 121° C.) and plated onto a 9 cm Petri dish containing LB agar supplemented with 15 μg/ml tetracycline. The plates were incubated overnight at 37° C. Two millilitres of 2×TY supplemented with 15% glycerol was then added to each plate, and the cells were loosened with a glass spreader and mixed thoroughly.

[0145] Fifty microlitres of the scraped bacteria were used to inoculate 50 ml of 2×TY supplemented with 15 μg/ml tetracycline and grown overnight at 37° C. with shaking at 250 rpm. The overnight culture was centrifuged at 3,300 g for 15 min to pellet the bacteria. To precipitate phage, 10 ml PEG/NaCl (20% Polyethylene glycol 8000, 2.5 M NaCl) was added to 40 ml supernatant. The phage/PEG solution was mixed and left on ice for 1 h. The solution was then spun at 3,300 g for 30 min at 4° C., and the supernatant was discarded. The pellet was re-suspended in 2 ml PBS and spun at 11,600 g for 10 min in a micro centrifuge to remove the remaining bacterial debris. The resultant supernatant containing phage was then used for the next round of selection against CD40-Fc antigen. Output titres from round one were in the range 7.5×10⁴ to 1.5×10⁷ TU/ml (transforming units per ml).

[0146] A second round of selection was performed using enriched phage recovered from the first round of selection. This was performed exactly as described above and the output titres were in the range 2.5×10⁷ to 1.2×10⁸ TU/ml.

[0147] A third round of selection was performed using enriched phage recovered from the second round of selection. These were performed as described above but with an antigen concentration of 1 μg/ml. Output titres were in the range 5.1×10⁷ to 7.5×10⁸ TU/ml.

[0148] To monitor the progress of the selections, monoclonal phage ELISAs were carried out following rounds 2 and 3. A sample of individual colonies were picked into 200 μl 2×TY supplemented with 15 μg/ml tetracycline and incubated overnight at 37° C. with shaking at 250 rpm in Costar 96 Well Cell Culture Clusters (Corning Incorporated, USA). The cultures were centrifuged to pellet the cells, and the supernatants were assayed by antigen binding ELISA for CD40-binding phage dAbs. All washes were performed using 3 washes of 250 μl PBST followed by 3 washes of 250 μl PBS. MaxiSorp 96 well immunoplates (Nunc, USA) were coated overnight at 4° C. with 50 μl/well of 0.5 μg/ml CD40-Fc (BMS) in 0.2 M carbonate-bicarbonate buffer, pH 9.4. The plates were washed and then blocked with 250 μl of 2% MPBS for 1 hour at room temperature. The plates were washed, and phage supernatants were added to an equal volume of 2% MPBS and incubated for 1 hour at room temperature. The plates were washed, and bound phage were detected with anti-M13-HRP conjugate (GE Healthcare, UK) diluted 1:5000 in 2% MPBS and incubated for 1 hour at room temperature. The plates were washed, and the ELISA was developed using SureBlue 1-Component TMB MicroWell Peroxidase solution (KPL Inc, USA). Specific phage dAbs were identified by comparison to plates coated with free Fc.

[0149] The dAb genes from each of the above rounds two and three selection outputs were sub-cloned, as a pool, into soluble expression vector pDOM5 in E. coli strain HB2151. This vector allowed expression of free dAb with a c-myc tag (Roche Diagnostics GmbH) in E. coli and secretion to the supernatant.

[0150] CD40-binding dAbs from passive selections were identified as follows. Ninety-six individual colonies (in pDOM5) were picked from each output into 200 μL Terrific Broth containing OnEx Autoinduction media (Novagen, UK) overnight at 37° C. with shaking at 250 rpm in Costar 96 Well Cell Culture Clusters (Corning Incorporated, USA). The cultures were centrifuged to pellet the cells, and the supernatants were assayed by antigen binding ELISA for CD40 binding dAbs. MaxiSorp 96 well immunoplates (Nunc, USA) were coated overnight at 4° C. with 50 μl/well of 0.5 μg/ml CD40-Fc (BMS) in 0.2 M carbonate-bicarbonate buffer, pH 9.4. All washes were as described for the phage ELISA. The plates were blocked for 1 hour at room temperature with 250 μl of PBS containing 1% Tween 20 (PBST). The clarified dAb-containing culture supernatant was added to the ELISA plate with an equal volume of 0.1% PBST. The plates were incubated for 1 hour at room temperature and then washed. Bound dAb was detected using a two step process: firstly biotinylated 9E10 (anti-myc IgG, Sigma-Aldrich, UK) diluted 1:2000 in 0.1% PBST was added for 1 hour at room temperature then washed, followed by streptavidin-HRP (Bender MedSystems, Austria) diluted 1:5000 in 0.1% PBST for 1 hour at room temperature. The plates were washed and the ELISA developed using SureBlue 1-Component TMB. Specific dAbs were identified by comparison to plates coated with free Fc.

[0151] Clones specific for CD40 were tested in either the bead- or ELISA-based receptor-binding assay (RBA) to assess for inhibition of CD40 ligand binding. The potency measurements obtained from the RBA are given in Table 5 (Primary Screening effort). Domain antibodies that showed inhibition in the RBA were tested in the B-cell proliferation assay and then in a variety of other in vitro cell assays.

BMS3h-210 to -225

[0152] BMS3h-210 to -225 were isolated from selections against whole cells. Phage from the naïve 4G and 6G Domantis dAb libraries were combined as follows before initiating selections:

[0153] 1) 4G+6G V_{H} CDR3 lengths between 7-9 amino acids.

[0154] 2) 4G+6G V_{H} CDR3 lengths between 10-12 amino acids.

[0155] 3) 4G+6G V_{H} CDR3 lengths between 13-15 amino acids.

[0156] 4) 4G and 6G VK

[0157] For round one a DG44 CHO cell line stably transfected with cell-surface expressed human CD40 (supplied by BMS) was used as antigen. Prior to selection against these cells, the library pools outlined above were incubated with non-transfected CHO cells to deplete them of phage displaying dAbs specific for cell surface antigens other than CD40. Both types of cells were harvested by incubation with Versene (Invitrogen) before assessing for viability. Six million viable non-transfected CHO cells were re-suspended in 4 ml PBS with 2% (w/v) BSA (PBS/BSA) and rotated end-over-end at 4° C. for 1 hour to block. All subsequent steps were performed at 4° C. unless otherwise noted. The cells were centrifuged at 185 g for 5 min and the supernatant, containing the depleted library phage, transferred to a fresh tube. To this were added 6×10⁶ viable CHO-CD40 cells in 1 ml PBS/BSA and the mixture was rotated for 1 hour. The cells were then washed five times by centrifuging at 185 g for 5 min and re-suspending in 10 ml PBS/BSA. After the final wash, the cells were pelleted as previously and were then resuspended in 0.5 ml of 1 mg/ml trypsin type XIII from bovine pancreas (Sigma Aldrich, UK) in PBS supplemented with 5 mM Tris-HCl pH 7.4, 0.1 mM CaCl₂ and transferred to a microcentrifuge tube. The cells were rotated at room temperature for 10 min before centrifuging at 16000 g for 5 min. Eluted phage in the supernatant were used to infect E. coli and the output phage titres were determined to be between 5.1×10⁵ and 2.7×10⁶ TU/ml (transforming units per ml).

[0158] A second round of selection was performed using enriched phage recovered from the first round of selection. These were performed as above but without the initial depletion (de-selection) step and using RAMOS human B cells (ATCC) instead of CHO-CD40. Output titres were in the range 2.3×10⁵ to 7.5×10⁵ TU/ml.

[0159] A third round of selection was performed as for the second round. Output titres were in the range 1.9×10⁸ to 3.5×10⁸ TU/ml.

[0160] The dAb genes from each of the above rounds two and three selection outputs were sub-cloned, as a pool, into soluble expression vector pDOM5 in E. coli strain HB2151. This vector allowed expression of free dAb with a c-myc tag in E. coli and secretion to the supernatant.

[0161] Clones specific for CD40 were tested in either the CHO cell receptor-binding assay (RBA) to assess for inhibition of CD40 ligand binding. Domain antibodies that showed inhibition in the RBA were tested in the B-cell proliferation assay and then in a variety of other in vitro cell assays.

### Affinity Maturation by Error-Prone PCR

[0162] Error-prone phage libraries were constructed for 13 BMS3h dAbs that showed neutralization activity in the B-cell proliferation assay described below in Example 6 (See TABLE 17). This was performed by using Mutazyme II polymerase (part of the GeneMorph II kit from Agilent Technologies) to randomly introduce errors into the dAb gene during amplification by polymerase chain reaction (PCR). The mutated dAb genes were cloned as a genetic fusion with the fd phage gene III protein under the control of the GAS 1 leader sequence in pDOM4 vector, which contained all the fd genes necessary to generate infective phage particles. These libraries were approximately 1×10⁸ CFU (colony forming units) in size, with an error-rate of 2-5 amino acids per dAb gene.

[0163] Phage generated from these libraries were subjected to three rounds of selection against soluble biotinylated human CD40. The first round of phage selection was performed by premixing the phage library with 2% MPBS (phosphate buffered saline supplemented with 2% (w/v) Marvel dried skimmed milk powder) and adding biotinylated human CD40 (BMS) to a final concentration of 20 nM in a final volume of 1 ml. The mixture was incubated for at least one hour at room temperature with mixing end-over-end. The antigen-phage complexes were then captured using 50 μl of M-280 streptavidin Dynabeads® (Invitrogen) and washed 7 times with 1 ml PBST followed by a single wash in 1 ml PBS. The washed phage were eluted from the antigen/bead complex by incubating with 0.5 ml of 1 mg/ml trypsin type XIII from bovine pancreas (Sigma Aldrich, UK) in PBS supplemented with 5 mM Tris-HCl pH 7.4, 0.1 mM CaCl₂. Eluted phage were used to infect E. coli and the output phage titres were determined to be between 2×10⁵ and 9×10⁷ TU/ml (transforming units per ml).

[0164] A second round of selection was performed using enriched phage recovered from the first round of selection, with a final concentration of 2 nM biotinylated CD40 followed by capture using streptavidin beads as described above. Output titres were in the range 3×10⁴ to 5×10⁶ TU/ml.

[0165] A third round of selection using 2 nM biotinylated CD40 followed by capture using streptavidin beads was performed. The eluted phage titres were in the range 8×10⁴ to 4×10⁶ TU/ml.

### BIAcore™ Screening

[0166] The dAb genes from each of the above round three selection outputs were sub-cloned, as a pool, into soluble expression vector pDOM 13 (Domantis) in E. coli HB2151. The pDOM13 vector is also known as pDOM33 and is disclosed in WO/2008/149143. This vector allowed expression of free dAb in E. coli and secretion to the supernatant. Forty-seven individual colonies were picked from each of the outputs and expressed in 200 μl Terrific Broth (TB) containing Novagen Overnight Express Autoinduction media (Merck Chemicals, UK) overnight at 37° C. with shaking at 250 rpm in Costar 96 Well Cell Culture Clusters (Corning Incorporated, USA). In the same plate, a single well was inoculated with E. coli expressing the appropriate parental (wild-type) dAb. The cultures were centrifuged to pellet the cells and the supernatants screened on a BIAcore™ 3000 instrument (GE Healthcare) for improvements in “off-rate” (i.e. dissociation rate constant, k_{d}) compared to parental dAb.

[0167] Approximately 1600 response units (RU) of biotinylated human CD40 (BMS) were immobilized on one flow-cell of a streptavidin (SA) BIAcore™ chip. A second flow cell without any ligand immobilized served as a reference flow-cell for inline referencing. Each dAb supernatant to be analyzed was diluted 1:3 in HBS-EP buffer (0.01 M HEPES pH 7.4 with 0.15 M NaCl, 3 mM EDTA and 0.005% v/v Surfactant P20, GE Healthcare). Ten microlitres of each dAb supernatant were injected, using the instrument's KINJECT function, across the CD40-immobilized and reference flow-cells in series, with inline subtraction of the signal from the reference cell. The experiment was performed at 25° C. and with a flow rate of 10 μl/min of HBS-EP. After each injection had been completed, the dAb was allowed to dissociate from the ligand in buffer for 120 s before regeneration with a 5 μl injection of 10 mM glycine pH 2.0. BIAevaluation 4.1 software (GE Healthcare) was used to subtract the reference flow-cell trace from each analyte trace. The same software was used to perform an approximate fit of a 1:1 (Langmuir) kinetic model to the dissociation phase of the analyte traces. This model yielded approximate dissociation rate constants (“off-rate” or k_{d}) for each clone and allowed relative comparisons to be made with the wild type dAb.

[0168] Clones with improved off-rates were identified for all lineages except BMS3h-129 and -197. Clones with improved off-rates were tested in either the bead- or ELISA-based receptor-binding assay (RBA) to assess for improved potency as described above. The potency measurements obtained from the RBA are given in the Tables labeled “Error-Prone-Matured Clones.” Clones that were more potent in the RBA were subsequently tested in a B-cell proliferation assay to assess for enhanced biological potency and these measurements obtained are given in TABLE 17. Domain antibodies that had improved potency in the B-cell proliferation assay were also tested in a variety of other in vitro cell assays.

### Affinity Maturation by Triplet Scanning Diversification

[0169] Five improved-potency dAbs isolated from the error-prone maturation, BMS3h-37-2, -38-2, -56-2, -193-25 and -217-23, were chosen to be further affinity matured by triplet scanning diversification. Phage libraries were constructed based on these parents as described above for the error-prone libraries except that, instead of using error-prone PCR, a series of overlapping degenerate triplet oligonucleotides were used to diversify the complementarity determining (CDR) regions of each dAb. For each dAb to be affinity matured, oligonucleotides containing NNS codon triplets (see Arkin et al. (1992) Proc. Nat'l Acad. Sci. USA 89:7811-7815) were used to make a number of libraries for each CDR by slicing by overlap extension (SOE) PCR. The triplets diversified by the oligonucleotides for a given CDR overlapped by two codons, resulting in two to four libraries per CDR. The amino acid residues diversified in the BMS3h-37-2 libraries were at positions 30, 31, 32, 33, 35, 50, 52, 53, 55, 56, 95, 96, 97, and 98 (Kabat numbering). The residues diversified in the BMS3h-38-2 libraries were as for 37-2, but with the addition of position 100. The residues diversified in the BMS3h-56-2 libraries were as for 37-2, but with the addition of positions 100 and 101. The residues diversified in the BMS3h-193-25 and -217-23 libraries were at positions 27, 28, 30, 31, 32, 34, 49, 50, 51, 53, 89, 91, 92, 93, 94, and 96.

[0170] Phage generated from these libraries were pooled by CDR and selections performed as described above, except that, for BMS3h-37-2, -38-2, -56-2 and -193-25, the concentrations of antigen used were 10, 1 and 0.1 nM for rounds one, two and three, respectively. For BMS3h-217-23 the concentrations of antigen used were 20, 2 and 0.2 nM for rounds one, two and three, respectively. For BMS3h-193-25, which is cross-reactive for cynomolgus CD40, selections were also performed against cyno CD40 in parallel. Additionally, selection rounds two and three were performed in the presence and absence of 100- or 1000-fold excess unlabelled CD40, respectively. The addition of this competitor was made after the initial one hour incubation of the phage with the biotinylated antigen and the mixture was then incubated, as before, for a further hour. This competition step was included with the aim of enhancing selection of dAbs with a slower off-rate. Round one titres were in the range 1.4×10⁶ to 1.4×10⁹. Titres in round 2 were 1.3×10⁵ to 4.0×10⁸ without competition and 8.6×10⁴ to 1.3×10⁸ with competition. Titres in round 3 were 1.2×10⁵ to 1.9×10⁸ without competition and 6.0×10⁵ to 1.2×10⁸ with competition.

[0171] These selection outputs were sub-cloned and screened as described for the error-prone affinity maturation. Clones with improved off-rates were identified for all lineages except BMS3h-193-25. Clones with improved off-rates were tested in the ELISA receptor-binding assay (RBA) to assess for improved potency. The potency measurements obtained from the RBA are given in the Tables labeled “Further-Matured Clones.” Clones that were more potent in the RBA were subsequently tested in a B-cell proliferation assay to assess for enhanced biological potency and these measurements obtained are given in TABLE 17. Domain antibodies that had improved potency in the B-cell proliferation assay were also tested in a variety of other in vitro cell assays.

### Example 2

### Screening Using Receptor Binding Assays (RBA)

[0172] Several in vitro receptor binding assays (RBA) were used to determined CD40 affinity of the anti-human CD40 variable domain amino acid sequences generated in Example 1. Three RBA formats were used: (1) a bead RBA, (2) an ELISA RBA, and (3) a CHO cell RBA.

### Bead RBA:

[0173] Phosphate buffered saline (PBS) washed Sphero streptavidin polystyrene particles (Saxon Europe, UK) were coated with 0.5 μg/ml biotinylated human IZ-CD40L (BMS). After coating, biotinylated CD40L particles were washed in PBS and diluted 1:10 in 0.1% (w/v) bovine serum albumin (BSA) (Sigma-Aldrich, UK) in PBS assay buffer. In a 384-well clear bottom, black walled plate (Applied Biosystems) a dilution range of purified dAb, 0.25 μg/ml human CD40 (BMS, CY24FEB06-01), 1 in 5000 mouse anti-human IgG (Fc) mAb clone GG-7 (Sigma-Aldrich, UK), 0.25 μg/ml goat anti-mouse ALEXA Fluor 647 (Invitrogen, Molecular probes, UK) and the biotinylated CD40L polystyrene particles were combined equally and allowed to incubate at room temperature for 6 hours in the absence of light. Following incubation, competitive binding of dAb vs. human CD40 to biotinylated CD40L particles was assessed using relative fluorescence with the AB8200 cellular detection mechanism (Applied Biosystems).

### ELISA RBA:

[0174] Clear walled High Bind, 384-well plates (Corning, UK) were coated with 25 μl of 1 μg/ml Neutravidin in 0.2 M carbonate-bicarbonate buffer, pH 9.4 overnight at 4° C. The following day, assay plates were washed with 0.1% (v/v) Tween PBS buffer, blocked with 1% (w/v) BSA in PBS for 1 hour at room temperature and washed again. Following removal of excess washing buffer, 25 μl 1 μg/ml of biotinylated human IZ-CD40L (BMS) was incubated with the assay plates for 1 hour at room temperature. Simultaneously, a dilution range of purified dAb and 1 μg/ml of human CD40 (BMS, CY24FEB06-01) were complexed in a 1:1 ratio. Following washing of the assay plate, the dAb:human CD40 complex was incubated in the assay plate at room temperature for 2 hours with gentle agitation. Competitive binding of dAb vs. human CD40 to biotinylated CD40L was detected with sequential incubations of 1 in 5000 mouse anti-human IgG (Fc) mAb clone GG-7 (Sigma-Aldrich, UK) followed by 1 in 10,000 horse radish peroxidase (HRP) conjugated goat anti-mouse IgG (Fc) secondary detection antibody (Sigma-Aldrich, UK). Absorbance signal was measured using a SpectraMax M5^{e} plate reader (Molecular Devices) at 450 nm following neutralization with 1M HCl solution.

### Cell Assays: CD40 CHO Cell RBA:

[0175] Stably transfected human CD40 expressing CHO-DG44 cells or native CHO-DG44 cells (both BMS) were detached from cell culture flasks using Versene (Invitrogen). Forty thousand cells per well were seeded into 96-well High Bind, black walled, clear bottom plates (Corning, UK) in 0.1% (w/v) BSA PBS assay buffer with a dilution range of dAb, 0.25 μg/ml of biotinylated human IZ-CD40L (BMS), and 0.25 μg/ml of streptavidin Alexa Fluor 647 (Invitrogen, Molecular probes, UK). The mixture was incubated in the absence of light for 6 hours. Following incubation, competitive binding of dAb vs. human CD40 CHO cells to soluble biotinylated IZ-CD40L was assessed using relative fluorescence with the AB8200 cellular detection mechanism (Applied Biosystems).

[0176] TABLES 5-7 respectively show the results from a primary screening effort (“naïve clones”) and subsequent rounds of affinity maturation (“error-prone matured clones” and “further-matured clones”) for the tested anti-human CD40 dAbs.

TABLE 5
Primary Screening Effort:

| | | | EC₅₀ cell RBA |
|---|---|---|---|
| | EC₅₀ Bead RBA | EC₅₀ ELISA | (CHO-CD40) |
| Naïve Clone | (nM) | RBA-(nM) | (nM) |
| BMS3h-37 | 100, 200 | | |
| BMS3h-38 | 600, 650 | | >10000 |
| BMS3h-41 | 2000, 1600 | | >10000 |
| BMS3h-43 | 100, 50, 50 | | 5000 |
| BMS3h-56 | 1000, 500 | | |
| BMS3h-106 | 300, 1000, 500, | | >10000 |
| | 400 | | |
| BMS3h-129 | 5000 | | |
| BMS3h-131 | 500, >1000 | | |
| BMS3h-193 | 1000 | | |
| BMS3h-197 | 30 | | |
| BMS3h-198 | 80 | | 600 |
| BMS3h-202 | 3000, 3700 | | >10000 |
| BMS3h-217 | 800 | | 1400 |
| BMS3h-231 | | 670, 870 | |
| BMS3h-233 | | 2770 | |
| BMS3h-257 | | 3210, 1340 | |
| BMS3h-242 | | 390, 210 | |
| BMS3h-262 | | 1770, 1160 | |
| BMS3h-263 | | 3130 | |
| BMS3h-271 | | 370, 210 | |
| BMS3h-285 | | 168, 258 | |
| BMS3h-287 | | >10000, 6758 | |
| BMS3h-289 | | 2390, >10000 | |

TABLE 6
Error-Prone-Matured Clones:

| | | EC₅₀ cell RBA |
|---|---|---|
| | EC₅₀ ELISA RBA | (CHO-CD40) |
| Clone | (nM) | (nM) |
| BMS3h-37-2 | | 32 |
| BMS3h-37-4 | | 45 |
| BMS3h-37-11 | | 27 |
| BMS3h-38-5 | | 1000 |
| BMS3h-38-8 | | 2800 |
| BMS3h-41-3 | | 200 |
| BMS3h-41-10 | | 4300 |
| BMS3h-43-3 | | 320 |
| BMS3h-43-5 | | 90 |
| BMS3h-56-1 | 7.1 | |
| BMS3h-56-2 | 17.0 | |
| BMS3h-56-5 | 4.9, 7.5, 4.7 | 18, 28 |
| BMS3h-56-7 | 5.5 | |
| BMS3h-56-8 | 6.2 | |
| BMS3h-56-9 | 4.4, 5.5 | |
| BMS3h-56-16 | 7.0 | |
| BMS3h-56-17 | 66 | |
| BMS3h-56-18 | 6.5 | |
| BMS3h-56-19 | 5.5, 5.1 | |
| BMS3h-56-20 | 6.8 | |
| BMS3h-56-21 | 6.5, 6.2 | |
| BMS3h-56-22 | 6.5 | |
| BMS3h-56-23 | 24.5 | |
| BMS3h-56-24 | 11.7 | |
| BMS3h-56-25 | 5.5 | |
| BMS3h-56-26 | 5.0 | |
| BMS3h-56-27 | 16.3 | |
| BMS3h-56-28 | 8.9 | |
| BMS3h-56-29 | 9.7 | |
| BMS3h-56-30 | 24.2 | |
| BMS3h-56-31 | 61.0 | |
| BMS3h-193-5 | >300 | |
| BMS3h-193-7 | 300 | |
| BMS3h-193-10 | 200 | |
| BMS3h-193-11 | 300 | |
| BMS3h-193-12 | 200 | |
| BMS3h-193-15 | | 300 |
| BMS3h-193-18 | 100 | |
| BMS3h-193-19 | 100 | |
| BMS3h-193-25 | 140 | |
| BMS3h-193-26 | 100 | |
| BMS3h-193-27 | 100 | |
| BMS3h-193-29 | 360, 114 | |
| BMS3h-193-30 | 290, 116 | |
| BMS3h-198-1 | 12 | 70 |
| BMS3h-198-2 | | 115 |
| BMS3h-198-3 | | 330 |
| BMS3h-198-9 | 20 | |
| BMS3h-198-10 | 35 | |
| BMS3h-198-11 | 20 | |
| BMS3h-198-14 | 9 | |
| BMS3h-198-17 | 20 | |
| BMS3h-198-19 | 7.9 | |
| BMS3h-198-22 | 10 | |
| BMS3h-198-31 | 6.1 | |
| BMS3h-198-32 | 24.7 | |
| BMS3h-198-33 | 8.7 | |
| BMS3h-198-34 | 32.6 | |
| BMS3h-198-37 | 15.1 | |
| BMS3h-198-38 | 7.2 | |
| BMS3h-202-10 | | 7200 |
| BMS3h-202-11 | | 8300 |
| BMS3h-217-1 | 23 | |
| BMS3h-217-2 | 78 | |
| BMS3h-217-3 | 32 | |
| BMS3h-217-4 | partial, 15 | |
| BMS3h-217-5 | 65 | |
| BMS3h-217-6 | 26 | |
| BMS3h-217-7 | 39 | |
| BMS3h-217-8 | 6 | |
| BMS3h-217-9 | 53 | |
| BMS3h-217-14 | 8 | |
| BMS3h-217-15 | 21 | |
| BMS3h-217-16 | 9 | |
| BMS3h-217-17 | 60 | |
| BMS3h-217-23 | 16 | |

TABLE 7
Further-Matured Clones:

| | EC₅₀ | EC₅₀ | EC₅₀ cell |
|---|---|---|---|
| | ELISA | ICAM1 cell | RBA (CHO- |
| Clone | RBA (nM) | assay (nM) | CD40) (nM) |
| BMS3h-37-202 | 4.1, 35 | | |
| BMS3h-37-205 | 3.1, 4.4 | | |
| BMS3h-37-206 | 3.2, 8.9 | | |
| BMS3h-37-207 | 2.5, 6.6 | | |
| BMS3h-37-212 | 24 | | |
| BMS3h-37-213 | 16 | | |
| BMS3h-38-201 | 3.4, | | |
| | inactive | | |
| BMS3h-38-202 | 4.8 | | |
| BMS3h-38-203 | 5.5 | | |
| BMS3h-38-204 | 4.8 | | |
| BMS3h-38-205 | 4.5, 11.1 | | |
| BMS3h-38-209 | 10.2 | | |
| BMS3h-38-211 | 2.3, 13.8 | | |
| BMS3h-38-215 | 2.3, 3.6 | | |
| BMS3h-38-217 | 1.8, 2.2 | | |
| BMS3h-38-218 | 3.0 | | |
| BMS3h-38-219 | 1.8, 7.1 | | |
| BMS3h-38-223 | 5.7 | | |
| BMS3h-38-224 | 6.3 | | |
| BMS3h-38-225 | 8.8 | | |
| BMS3h-38-226 | 18.1 | | |
| BMS3h-38-228 | 4 | | |
| BMS3h-38-231 | 4.4 | | |
| BMS3h-38-235 | 1.5 | | |
| BMS3h-38-237 | 2 | | |
| BMS3h-38-238 | 5.1 | | |
| BMS3h-56-201 | 3.7, 2.3 | 10.0 | |
| BMS3h-56-202 | 3.4, 3.2 | 80.0 | |
| BMS3h-56-203 | 5.2, 4.3 | 70.0 | |
| BMS3h-56-204 | 4.5 | | |
| BMS3h-56-205 | 9.0 | | |
| BMS3h-56-206 | 2.9, 2.3 | 5.0 | |
| BMS3h-56-207 | 7.3 | | |
| BMS3h-56-215 | 3.2, 4.6 | 40.0 | |
| BMS3h-56-217 | 2.1, 12.6 | | |
| BMS3h-56-220 | 4.2 | | |
| BMS3h-56-223 | 5.0 | | |
| BMS3h-56-224 | 2.1, 4.2 | | |
| BMS3h-56-225 | 2.9 | | |
| BMS3h-56-229 | 4.1 | | |
| BMS3h-56-232 | 2.8, 3.7 | | |
| BMS3h-56-239 | 2.7 | | |
| BMS3h-56-243 | 9.9 | | |
| BMS3h-56-244 | 6.0 | | |
| BMS3h-56-246 | 11.1 | | |
| BMS3h-56-248 | 0.7 | | |
| BMS3h-56-253 | 1.3 | | |
| BMS3h-56-258 | 5.2 | 23.0 | 15 |
| BMS3h-56-261 | 5.7 | 42.4 | 17 |
| BMS3h-56-262 | 4.0 | 135.0 | 42 |
| BMS3h-56-265 | 18.8 | 289.0 | 88 |
| BMS3h-56-266 | 3.8 | 31.9 | 27 |
| BMS3h-56-269 | 3.3 | 34.2 | 24 |
| BMS3h-56-270 | 11.3 | 93.8 | 91 |
| BMS3h-193-2501 | 114 | | |
| BMS3h-193-2502 | 170 | | |
| BMS3h-193-2503 | 3000 | | |
| BMS3h-193-2504 | 140 | | |
| BMS3h-193-2505 | 500 | | |
| BMS3h-193-2506 | 180 | | |
| BMS3h-193-2507 | 160 | | |
| BMS3h-193-2510 | 170 | | |
| BMS3h-193-2511 | 270 | | |
| BMS3h-193-2512 | 600 | | |
| BMS3h-193-2513 | 130 | | |
| BMS3h-193-2514 | 525 | | |
| BMS3h-193-2515 | 100 | | |
| BMS3h-193-2516 | 100 | | |

### Example 3

### CD40 Binding Kinetics

[0177] The binding kinetics were determined for anti-human CD40 dAbs identified in the primary screening effort (“naïve clones”) and subsequent rounds of affinity maturation (“error-prone matured clones”). The methods used directly measure the affinity of the dAbs for CD40.

[0178] A BIAcore™ 3000 instrument (GE Healthcare) was used to analyze the binding kinetics of CD40-specific dAbs to CD40. Approximately 600 response units (RU) of biotinylated human CD40 (BMS) were immobilized on one flow-cell of a streptavidin (SA) BIAcore™ chip. A second flow cell without any ligand immobilized served as a reference flow-cell for inline referencing. An appropriate doubling dilution series of each dAb to be analyzed was prepared in HBS-EP buffer (0.01 M HEPES pH 7.4 with 0.15 M NaCl, 3 mM EDTA and 0.005% v/v Surfactant P20, GE Healthcare). One hundred and eighty microlitres of each dAb were injected in duplicate using the instrument's KINJECT function. Each dAb was injected across the CD40-immobilised and reference flow-cells in series with inline subtraction of the signal from the reference cell. The experiment was performed at 25° C. and a flow rate of 30 μl/min of HBS-EP. After each injection had been completed, the dAb was allowed to dissociate from the ligand in buffer for 300 s before regeneration with a 10 μl injection of 10 mM glycine pH 2.0. A reference injection of HBS-EP buffer blank (containing no analyte) was also injected under the same conditions, to serve as a second reference for subtraction from each analyte trace. BlAevaluation 4.1 software (GE Healthcare) was used to subtract both the reference flow-cell trace and the buffer blank trace from each analyte trace. The same software was used to perform a simultaneous, global fit of a 1:1 (Langmuir) kinetic model to the association and dissociation phases of the analyte dilution series traces. This model yielded association and dissociation rate constants (kₐ and k_{d}, respectively) and the equilibrium dissociation constant (K_{D}) of the interaction; these are detailed in TABLES 8 and 9.

TABLE 8
Naïve Clones:

| | BIAcore ™ | BIAcore ™ | BIAcore ™ |
|---|---|---|---|
| Clone | kₐ (M⁻¹ s⁻¹) | k_{d} (s⁻¹) | K_{D} (M) |
| BMS3h-37 | 1.9E+04 | 3.6E−03 | 1.9E−07 |
| BMS3h-38 | 2.1E+04 | 6.2E−03 | 3.0E−07 |
| BMS3h-41 | 9.9E+03 | 8.3E−03 | 8.4E−07 |
| BMS3h-43 | 1.4E+03 | 3.1E−03 | 2.1E−06 |
| BMS3h-56 | 2.3E+04 | 4.0E−03 | 1.8E−07 |
| BMS3h-106 | 1.3E+05 | 4.6E−02 | 3.5E−07 |
| BMS3h-107 | 2.0E+05 | 1.7E−01 | 8.5E−07 |
| BMS3h-129 | 4.7E+05 | 5.1E−01 | 1.1E−06 |
| BMS3h-131 | 2.4E+04 | 2.2E−02 | 9.3E−07 |
| BMS3h-197 | 8.1E+04 | 1.4E−02 | 1.8E−07 |
| BMS3h-198 | 1.6E+03 | 3.8E−04 | 2.4E−07 |
| BMS3h-202 | 1.7E+03 | 3.5E−03 | 2.0E−06 |

TABLE 9
Error-Prone Matured Clones:

| | BIAcore ™ | BIAcore ™ | BIAcore ™ |
|---|---|---|---|
| Clone | kₐ (M⁻¹ s⁻¹) | k_{d} (s⁻¹) | K_{D} (M) |
| BMS3h-37-2 | 1.0E+05 | 4.1E−04 | 4.0E−09 |
| BMS3h-37-5 | 3.9E+04 | 2.2E−04 | 5.5E−09 |
| BMS3h-37-9 | 1.5E+04 | 1.8E−04 | 1.2E−08 |
| BMS3h-38-1 | 3.2E+04 | 1.1E−03 | 3.3E−08 |
| BMS3h-38-2 | 6.1E+04 | 7.5E−04 | 1.2E−08 |
| BMS3h-38-3 | 7.5E+04 | 4.1E−04 | 5.5E−09 |
| BMS3h-41-1 | 5.1E+04 | 5.6E−04 | 1.1E−08 |
| BMS3h-43-1 | 4.4E+03 | 6.3E−04 | 1.4E−07 |
| BMS3h-43-3 | 3.1E+04 | 5.9E−04 | 1.9E−08 |
| BMS3h-56-1 | 9.8E+04 | 5.4E−04 | 5.5E−09 |
| BMS3h-56-2 | 1.1E+05 | 6.0E−04 | 5.3E−09 |
| BMS3h-56-5 | 1.1E+05 | 6.3E−04 | 5.9E−09 |
| BMS3h-56-7 | 1.3E+05 | 4.7E−04 | 3.5E−09 |
| BMS3h-56-9 | 1.5E+05 | 3.9E−04 | 2.6E−09 |
| BMS3h-131-2 | 7.9E+04 | 1.7E−03 | 2.1E−08 |
| BMS3h-193-25 | 4.6E+05 | 3.7E−02 | 8.1E−08 |
| BMS3h-198-1 | 1.5E+04 | 1.8E−04 | 1.3E−08 |
| BMS3h-202-5 | 4.4E+03 | 1.3E−03 | 3.0E−07 |

### Example 4

### Biophysical Characterization

[0179] Anti-human CD40 dAbs identified in the primary screening effort (“naïve clones”) and subsequent rounds of affinity maturation (“error-prone matured clones” and “further-matured clones”) were further characterized by analysis of biophysical parameters. To measure the relative stability of the dAbs, their melting point was determined by differential scanning calorimetry (DSC). dAbs with a higher melting temperature are more stable. To determine whether the dAbs form multimeric aggregates in solution, the dAbs were assayed by size exclusion chromatography/multiangle laser light scattering (SEC-MALLS). The results are shown in TABLES 10-12.

TABLE 10
Naïve clones:

| | DSC | |
|---|---|---|
| Clone | (Tm/° C.) | SEC-MALS solution state |
| BMS3h-38 | 59 | Monomer and dimer (<5%) |
| BMS3h-41 | 59 | Monomer and monomer-dimer |
| | | equilibrium (<5%) |
| BMS3h-43 | | Dimer and trimer |
| BMS3h-56 | 57 | Monomer and dimer (<10%) |
| BMS3h-106 | | Monomer |
| BMS3h-107 | 63 | Monomer |
| BMS3h-129 | 59 | Monomer |
| BMS3h-193 | 56 | Monomer |
| BMS3h-197 | 62 & 53 | Monomer and dimer (<5%) |
| BMS3h-198 | 61 | Monomer |
| BMS3h-202 | 60 | Monomer and monomer-dimer |
| | | equilibrium (<2%) |
| BMS3h-207 | | Dimer and tetramer |
| BMS3h-208 | | Monomer and dimer |
| BMS3h-217 | 57 | Dimer |
| BMS3h-233 | | Monomer |
| BMS3h-242 | | Monomer and monomer-dimer |
| BMS3h-262 | | Monomer |
| BMS3h-265 | | Dimer |
| BMS3h-271 | | Dimer |
| BMS3h-285 | | Monomer |

TABLE 11
Error-Prone-Matured Clones:

| | DSC | |
|---|---|---|
| Clone | Tm/° C. | SEC-MALS solution state |
| BMS3h-37-1 | 57.2 | |
| BMS3h-37-2 | 56.2 | |
| BMS3h-37-9 | 59.7 | |
| BMS3h-37-11 | 60.0 | |
| BMS3h-56-1 | 49.6 | Monomer |
| BMS3h-56-2 | 63.0 | Monomer and dimer (<2%) |
| BMS3h-56-3 | 64.0 | Monomer (>98%) |
| BMS3h-56-5 | 51.2 | |
| BMS3h-41-1 | 56 | Monomer (~99%) |
| BMS3h-41-2 | 53.4 | |
| BMS3h-41-3 | 51.8 | |
| BMS3h-41-9 | 61 | Monomer and Monomer/Dimer |
| | | rapid equilibrium (<2%) |
| BMS3h-41-12 | 49.8 | Monomer/Dimer |
| BMS3h-41-13 | | Monomer/Dimer |
| BMS3h-43-1 | 53 | Monomer (~99%) |
| BMS3h-43-3 | 51.2 | |
| BMS3h-43-5 | 48.2 | Monomer/Dimer |
| BMS3h-43-10 | 51.8 | |
| BMS3h-43-11 | 54.8 | |
| BMS3h-43-12 | | Dimer (60%) and Monomer (40%) |
| BMS3h-56-1 | 59.2 | Monomer/Dimer |
| BMS3h-56-2 | 60.1 | Monomer/Dimer |
| BMS3h-56-5 | 57 | Monomer (>95%) |
| BMS3h-56-6 | 57.5 | Monomer/Dimer |
| BMS3h-56-7 | 61 | Monomer + Monomer/Dimer |
| | | rapid equilibrium (<5%) |
| BMS3h-56-8 | 58 | Monomer (>98%) |
| BMS3h-56-9 | 61 | Monomer + dimer (<5%) |
| BMS3h-56-14 | 60.1 | Monomer |
| BMS3h-193-8 | 60 | |
| BMS3h-193-12 | 52 | |
| BMS3h-193-16 | 54.5 & | Monomer |
| | 65.7 | |
| BMS3h-193-19 | 56.8 | Monomer |
| BMS3h-193-25 | 55.8 | Monomer |
| BMS3h-193-29 | 60 | Monomer |
| BMS3h-193-30 | 58 | |
| BMS3h-198-1 | 52.5 | Monomer |
| BMS3h-198-2 | | Monomer |
| BMS3h-198-3 | 59 | |
| BMS3h-198-5 | 55.6 | |
| BMS3h-198-19 | 60.7 | |
| BMS3h-198-24 | 59.9 | Monomer |
| BMS3h-198-28 | 60.3 | Monomer |
| BMS3h-202-1 | 56.8 | Monomer |
| BMS3h-202-5 | 55.5 | Trimer (60%) and Monomer/Dimer (40%) |
| BMS3h-202-10 | 58.3 | Trimer (60%) and Monomer/Dimer (40%) |
| BMS3h-217-1 | | Monomer/Dimer |
| BMS3h-217-2 | | Dimer |
| BMS3h-217-3 | | Dimer |
| BMS3h-217-4 | | Monomer/Dimer |
| BMS3h-217-5 | | Dimer |
| BMS3h-217-6 | | Dimer |
| BMS3h-217-8 | | Dimer |
| BMS3h-217-14 | | Monomer/Dimer |
| BMS3h-217-15 | | Dimer |
| BMS3h-217-16 | | Dimer |
| BMS3h-217-17 | | Monomer/Dimer |
| BMS3h-217-23 | | Dimer |

TABLE 12
Further-Matured Clones:

| Clone | DSC Tm/° C. | SEC-MALS solution state |
|---|---|---|
| BMS3h-37-206 | | Monomer (73%) and dimer (20%) +HMW |
| BMS3h-37-212 | Dimer | |
| BMS3h-38-201 | | Monomer (75%) and Dimer (15%) |
| BMS3h-38-228 | | Monomer (90%) and Trimer (10%) |
| BMS3h-38-231 | | Monomer (90%) and Dimer (10%) |
| BMS3h-38-235 | | Monomer (90%) and Trimer-Dimer |
| BMS3h-38-237 | | Monomer (90%) and Tetramer (10%) |
| BMS3h-38-238 | | Monomer (95%) and Dimer-Monomer |
| BMS3h-56-201 | 57.4 + 61.8 | Monomer and Dimer (15%) |
| BMS3h-56-202 | | Monomer |
| BMS3h-56-203 | | Monomer and Trimer |
| BMS3h-56-206 | | Monomer |
| BMS3h-56-215 | | Monomer, Dimer (2%) and Trimer (9%) |
| BMS3h-56-217 | 52.8 + 54.6 | |
| BMS3h-56-232 | 51.0 + 56.1 | Monomer (95%) and Dimer (5%) |
| BMS3h-56-239 | 53.5 | Monomer |
| BMS3h-56-243 | 51.9 | Monomer and Pentamer |
| BMS3h-56-244 | | Monomer (90%) and Trimer (10%) |
| BMS3h-56-248 | | Monomer (60%), Dimer and Tetramer |
| BMS3h-56-253 | | Monomer |
| BMS3h-56-258 | 62.5 +57.5 | |
| BMS3h-56-261 | 58.6 +61.5 | |
| BMS3h-56-266 | 61.3 +62.3 | |
| BMS3h-56-269 | 64.5 +67.2 | |

### Example 5

### Competition Analysis

[0180] A BIAcore™ 3000 instrument (GE Healthcare) was used to analyze whether CD40-specific dAbs bound the same CD40 epitope. Approximately 600 response units (RU) of biotinylated human CD40 (BMS) were immobilized on one flow-cell of a streptavidin (SA) BIAcore™ chip. A second flow-cell without any ligand immobilized served as a reference flow-cell for inline referencing. An appropriate dilution of each dAb or Fab to be analyzed was prepared in HBS-EP buffer (0.01 M HEPES pH 7.4 with 0.15 M NaCl, 3 mM EDTA and 0.005% v/v Surfactant P20, GE Healthcare). The dilution chosen was one which when injected as described below resulted in >80% of the maximum possible bound RU for the particular inhibitor, typically 1-10 μM. Next, a mixture of the same dAb or Fab as above (at the same final concentration) was prepared with a second dAb or Fab to be analyzed for competition. The COINJECT function of the instrument was used to inject 60 μl of the single-inhibitor dilution across the CD40-immobilized and reference flow-cells in series, followed immediately by a 60 μl injection of the two-inhibitor mixture. Inline subtraction of the signal from the reference cell was performed by the instrument's control software. The experiment was performed at 25° C. and a flow rate of 30 μl/min of HBS-EP. After each co-injection had been completed, the inhibitors were allowed to dissociate from the ligand in buffer for 60 s before regeneration with a 10 μl injection of 10 mM glycine pH 2.0. The maximum RU obtained for the second injection (the mixture of the two inhibitors) was noted and expressed as a percentage of the RU obtained for the same inhibitor when injected alone.

[0181] If the second inhibitor retained at least 100% of the RU usually bound when it was injected alone, then this implied that the two inhibitors bind to discrete epitopes. If less than 100% binding of the second inhibitor was observed, then this was indicative of competition between the two inhibitors for binding to CD40. There are several possible reasons for this competition: the two inhibitors may bind to the same or overlapping epitopes, there may be steric inhibition of binding, or binding of the first inhibitor may induce a conformational change in the antigen that prevents or reduces binding of the second inhibitor.

[0182] An example clone from each lineage (except BMS3h-217) was tested for competition with other dAbs in overlapping groups. All the dAbs tested appear to compete with each other for binding to CD40, as shown in TABLES 13 and 14. This data suggests that all antibody polypeptides selected from the group consisting of lineage BMS3h-37, BMS3h-38, BMS3h-41, BMS3h-43, BMS3h-56, BMS3h-131, BMS3h-198, and BMS3h-202 should compete with the binding of a dAb from any of these lineages to human CD40.

TABLE 13
Competition BIAcore ™:

| | | Second Injection (% of single dAb RU) | | | | |
|---|---|---|---|---|---|---|
| First | RU | BMS3h- | BMS3h- | BMS3h- | BMS3h- | BMS3h- |
| injection | first dAb alone | 56-5 | 37-11 | 131-2 | 198-1 | 202-11 |
| BMS3h- | 245 | | −15 | 17 | 0.6 | 7.3 |
| 56-5 | | | | | | |
| BMS3h- | 158 | 15 | | 25 | 16 | 0.3 |
| 37-11 | | | | | | |
| BMS3h- | 220 | 22 | −3.7 | | 23.2 | 10.3 |
| 131-2 | | | | | | |
| BMS3h- | 176 | 28 | 6.4 | 41 | | 18 |
| 198-1 | | | | | | |
| BMS3h- | 124 | 50 | 42 | 57 | 39 | |
| 202-11 | | | | | | |

TABLE 14

| | RU first | Second Injection (% of single dAb RU) | | | |
|---|---|---|---|---|---|
| First | dAb | BMS3h- | BMS3h- | BMS3h- | BMS3h- |
| injection | alone | 38-2 | 41-9 | 43-1 | 56-5 |
| BMS3h- | 170 | | 11 | 29 | 29 |
| 38-2 | | | | | |
| BMS3h- | 150 | 27 | | 44 | 47 |
| 41-9 | | | | | |
| BMS3h- | 210 | 20 | 19 | | 39 |
| 43-1 | | | | | |
| BMS3h- | 190 | 4 | 0 | 22 | |
| 56-5 | | | | | |

[0183] Similarly, various dAbs were tested for competition with Chi220 Fab′, as shown in TABLES 15 and 16. In this case, all the dAbs do not compete with Chi220 Fab′, except BMS3h-217, which shows competition. BMS3h-56-5 and BMS3h-193-12 dAbs bound with at least 100% of single dAb RU in the presence of bound Chi220 or G28-5 Fab′, suggesting that the Fab′ s bind a different epitope(s) than the dAbs. Chi220 Fab′ showed a reduction of bound RU in the presence G28-5. The same result was observed in the opposite order of binding. This suggests that G28-5 Fab′ binds the same epitope as Chi220 Fab′.

TABLE 15

| | RU first | Second Injection (% of single dAb/Fab RU) | | | |
|---|---|---|---|---|---|
| | dAb/Fab | BMS3h- | Chi220 | G28-5 | BMS3h- |
| First injection | alone | 56-5 | Fab | Fab | 193-12 |
| BMS3h-56-5 | 193 | | 98 | 94 | 64 |
| Chi220 Fab | 1089 | 105 | | 11 | 109 |
| G28-5 Fab | 730 | 125 | 39 | | 116 |
| BMS3h-193-12 | 282 | 44 | 98 | 93 | |

TABLE 16

| | | | % of single dAb |
|---|---|---|---|
| | μM dAb or Fab | | RU |
| Clone name | tested | Single dAb RU | (Chi220 + dAb) |
| BMS3h-38-2 | 5 | 156 | 121 |
| BMS3h-41-13 | 5 | 162 | 109 |
| BMS3h-43-3 | 5 | 300 | 101 |
| BMS3h-38-2 | 5 | 175 | 114 |
| BMS3h-56-5 | 5 | 193 | 105 |
| BMS3h-106 | 10 | 165 | 111 |
| BMS3h-107 | 10 | 35 | 146 |
| BMS3h-129 | 10 | 156 | 121 |
| BMS3h-193-12 | 5 | 282 | 98 |
| BMS3h-197 | 1 | 177 | 116 |
| BMS3h-217 | 10 | 85 | 25 |
| G28-5 Fab | 1 | 730 | 11 |

### Example 6

### CD40 Activity Assays

[0184] Anti-human CD40 dAbs were assayed functionally for their ability to antagonize CD40 activities. The CD40 activities tested were B cell proliferation and cytokine production by hCD40L-driven activation of primary human monocyte-derived dendritic cells (DCs). Unless otherwise noted, all assays were performed in RPMI media supplemented with 10% fetal calf serum (FCS). The results using the various assays are shown in TABLE 17.

### Soluble IZ-hCD40L-Driven Primary Human B Cell Proliferation:

[0185] 1×10⁵ tonsillar human B cells were incubated with 0.6 μg/ml of IZ-hCD40L along with varying titrations of antibody polypeptide in a final volume of 200 μl/well in a 96-well round bottom plate. The plates were incubated at 37° C. for 72 hours, then thymidine (³H; 0.5 μci/well) was added for 6 hours. B cell proliferation was quantified based on thymidine incorporation.

### CHO-hCD40L-Driven Primary Human B Cell Proliferation:

[0186] CHO cells were transfected with human CD40L to generate a stable cell line expressing high levels of CD40L on the cell surface. CHO-CD40L cells were irradiated at 10,000 Rads before incubation with human B cells. 1×10⁵ tonsillar human B cells were incubated with 1×10³ CHO-CD40L cells (1:100 ratio of CHO-CD40L: human B cells) along with varying titrations of antibody polypeptide in a final volume of 200 μl/well in a 96-well round bottom plate. The plates were incubated at 37° C. for 72 hours following which ³H-thymidine (0.5 μci/well) was added for 6 hours. B cell proliferation was quantified based on thymidine incorporation.

### Soluble IZ-hCD40L-Driven Cyno Splenic Human B Cell Proliferation:

[0187] 1×10⁵ cyno splenic B cells were incubated with 0.5 μg/ml of IZ-hCD40L along with varying titrations of antibody polypeptide in a final volume of 200 μl/well in a 96-well round bottom plate. The plates were incubated at 37° C. for 72 hours following which ³H-thymidine (0.5 μci/well) was added for 6 hours. B cell proliferation was quantified based on thymidine incorporation.

### Primary T Cell-Driven Human B Cell Proliferation:

[0188] T cells were isolated from human peripheral blood mononuclear cells (PBMC) and enriched using sheep red blood cell (SRBC) rosetting. Human tonsillar B cells were isolated by homogenizing tonsil tissue to a single-cell suspension. Leukocytes were obtained by ficoll separation, then B cells were negatively selected busing SRBC resetting and enriched by discarding the rosetted cells.

[0189] Enriched human T cells were cultured with PM-LCLs (an EBV-transformed B cell line; irradiated at 10,000 Rads) at a 5:1 ratio (T:LCL) for 6 days at 37° C. to generate a population of allogeneic T cells. At day 6, the expanded T cells were isolated and irradiated at 3000 Rads, and then cultured (5×10⁴ T cells/well) with primary human tonsillar B cells (1×10⁵B cells/well) at a 1:2 ratio in 96-well flat bottom plated coated with anti-CD3 mAb (OKT3). Varying titrations of antibody polypeptides were added to each well; the final volume in each well was 200 μl. Test plates were incubated at 37° C. for 3 days. Human B cell proliferation was determined via the addition of ³H-thymidine (0.5 μci/well) to the cultures for the last 18 hours.

### CHO-hCD40L-Driven Activation of Primary Human Monocyte-Derived Dendritic Cells (DCs):

[0190] Human PBMCs were enriched for monocytes by depleting T cells via SRBC rosetting. The monocyte-enriched PBMCs were cultured with 10 ng/ml GM-CSF and 5 ng/ml IL-4 in 6-well plates for 6 days at 37° C. The cultured plates were replenished with fresh media (with GM-CSF and IL-4) on days 2 and 5. The immature dendritic cells (DCs) were used in cell assays on day 6. 8×10⁴ immature DCs were cultured with 4×10³ CHO-hCD40L cells (irradiated at 10,000 Rads) along with varying titrations of antibody polypeptides in a 96-well flat bottom plate. After 24 hours, supernatants were harvested and tested for the presence of various cytokines (IL-12, TNF, IL-23). DC activation was determined by the levels of cytokine production.

TABLE 17

| | | | CHO- | | CHO- |
|---|---|---|---|---|---|
| | hIZCD40L- | hIZCD40L- | hCD40L- | | hCD40L- |
| | driven Human | driven Cyno B | driven Human | | driven DC |
| | B Cell | Cell | B Cell | | Activation |
| | Proliferation | Proliferation | Proliferation | T-B cell MLR | IL-12 EC50 |
| Clone | EC50 (nM) | EC50 (nM) | EC50 (nM) | EC50 (nM) | (nM) |
| 3h-5 | >7000 | | >7000 | | |
| 3h-8 | >7000 | | >7000 | | |
| 3h-28 | >7000 | | >7000 | | |
| 3h-33 | >7000 | | >7000 | | |
| 3h-48 | >7000 | | >7000 | | |
| 3h-52 | >7000 | | >7000 | | |
| 3h-57 | >7000 | | >7000 | | |
| 3h-61 | >7000 | | >7000 | | |
| 3h-88 | >7000 | | | | |
| 3h-102 | >7000 | | | | |
| 3h-106 | 437.0 ± 214.0 | >7000 | | | |
| 3h-107 | >7000 | >7000 | | | |
| 3h-112 | >7000 | | | | |
| 3h-129 | 2100.0 ± 1000.0 | | | | |
| 3h-197 | 360.0 ± 500.0 | >7000 | | | |
| 3h-207 | >7000 | | | | |
| 3h-208 | >7000 | | | | |
| 3h-37 | 3400.0 ± 2900.0 | >7000 | | | |
| 3h-37-1 | 250.0 ± 100.0 | | | | |
| 3h-37-2 | 5.0 ± 2.0 | >7000 | | 198 ± 35 | 13.0 ± 7.3 |
| 3h-37-202 | 0.6 ± 0.2 | | | 83 ± 18 | 10.0 |
| 3h-37-205 | 2.0 ± 1.0 | | | | 6.6 |
| 3h-37-206 | 5.0 ± 0.8 | | | | 23.0 |
| 3h-37-207 | 4.0 ± 2.0 | | | | 15.5 ± 8.0 |
| 3h-37-212 | 1.0 ± 0.05 | | | | |
| 3h-37-213 | 0.7 ± 0.2 | | | | |
| 3h-37-11 | 8.0 ± 7.0 | | | | |
| 3h-38 | 2800.0 ± 400.0 | >7000 | | | |
| 3h-38-1 | 142.0 ± 86.0 | | | | |
| 3h-38-2 | 10.0 ± 6.0 | >7000 | 723.0 ± 185.0 | 986 ± 383 | 289.0 ± 315.0 |
| 3h-38-201 | >70.0 | | >7000 | | >800.0 |
| 3h-38-205 | 4.0 ± 2.0 | | 1100.0 ± 141.0 | | 29.0 |
| 3h-38-211 | 2.0 ± 1.0 | | 82.0 ± 4.0 | 200 ± 1 | 18.0 ± 19.0 |
| 3h-38-215 | 1.0 ± 0.0 | | 65.0 ± 1.0 | 163 ± 14 | 6.0 ± 4.0 |
| 3h-38-217 | 0.8 ± 0.2 | | 34.0 ± 6.0 | 74 ± 22 | 1.7 ± 0.4 |
| 3h-38-219 | 2.0 ± 0.5 | | 93.0 ± 26.0 | 164 ± 3 | 9.0 ± 5.0 |
| 3h-38-228 | 0.7 ± 0.05 | | | | |
| 3h-38-231 | 0.66 ± 0.2 | | | | |
| 3h-38-235 | 0.4 ± 0.2 | | | | |
| 3h-38-237 | 0.4 ± 0.2 | | | | |
| 3h-38-238 | 0.7 ± 0.03 | | | | |
| 3h-38-3 | 10.0 ± 7.0 | | | | |
| 3h-41 | >7000 | | | | |
| 3h-41-1 | 104.0 ± 56.0 | | | | |
| 3h-41-2 | 47.0 ± 67.0 | | | | |
| 3h-41-3 | 12.0 ± 7.0 | >7000 | | | |
| 3h-41-9 | 148.0 ± 98.0 | | | | |
| 3h-41-12 | 104.0 ± 50.0 | | | | |
| 3h-41-13 | 208.0 ± 90.0 | | | | |
| 3h-43 | 83.0 ± 40.0 | >7000 | | | |
| 3h-43-1 | 53.0 ± 20.0 | | | | |
| 3h-43-3 | 87.0 ± 19.0 | | | | |
| 3h-43-5 | 180.0 ± 130.0 | | | | |
| 3h-43-10 | 143.0 ± 131.0 | | | | |
| 3h-43-11 | 30.0 ± 19.0 | | | | |
| 3h-43-12 | 12.0 ± 6.0 | | | | |
| 3h-56 | 713.0 ± 133.0 | >7000 | | | |
| 3h-56-1 | 7.0 ± 5.0 | | | | |
| 3h-56-2 | 3.0 ± 1.0 | | 326.0 ± 79.0 | 276 ± 29 | 444.0, |
| | | | | | >2000.0 |
| 3h-56-201 | 0.12 ± 0.04 | | 11.0 ± 6.0 | 7.25 ± 0.96 | 0.93 ± 0.7 |
| 3h-56-202 | 0.6 ± 0.2 | | 39.0 ± 16.0 | 50 ± 9.8 | 2.9 ± 2.6 |
| 3h-56-203 | 0.45 ± 0.1 | | 51.0 ± 29.0 | 52 ± 23 | 3.7 ± 4.0 |
| 3h-56-206 | 0.1 ± 0.01 | | 6.0 ± 2.0 | 5.25 ± 0.5 | 0.7 ± 0.4 |
| 3h-56-215 | 0.2 ± 0.03 | | 41.0 ± 15.0 | 31 ± 7 | 11.0 ± 12.0 |
| 3h-56-217 | 0.1 ± 0.04 | | 13.0 ± 5.0 | 16 ± 6.7 | 9.4 ± 8.0 |
| 3h-56-224 | 0.5 ± 0.2 | | 26.0 ± 5.0 | 47 ± 11 | 18.0 ± 22.0 |
| 3h-56-232 | 0.27 ± 0.1 | | 37.0 ± 0.7 | 42 ± 10 | 7.3 ± 6.6 |
| 3h-56-239 | 0.11 ± 0.0 | | 18.0 ± 4.0 | 13.5 ± 4.76 | 5.8 ± 6.5 |
| 3h-56-243 | 0.15 ± 0.007 | | 13.5 ± 2.0 | 14.2 ± 4.6 | 8.8 ± 10.0 |
| 3h-56-244 | 0.17 ± 0.02 | | 26.0 ± 3.0 | 21 ± 4.1 | 12.6 ± 16.0 |
| 3h-56-246 | 0.24 ± 0.06 | | 34.0 ± 14.0 | 23.8 ± 6.2 | 23.2 ± 22.0 |
| 3h-56-248 | 0.36 ± 0.1 | | | | |
| 3h-56-253 | 0.4 ± 0.2 | | | | |
| 3h-56-258 | 0.079 ± 0.003 | | 11.0 ± 3.0 | 8.7 ± 1.9 | 1.52 ± 1.6 |
| 3h-56-261 | 0.17 ± 0.09 | | 25.5 ± 6.0 | 17 ± 5.4 | 3.0 ± 1.8 |
| 3h-56-262 | 0.31 ± 0.007 | | | | |
| 3h-56-265 | 0.36 ± 0.06 | | | | |
| 3h-56-266 | 0.19 ± 0.04 | | 19.5 ± 6.0 | 13.8 ± 2.4 | 2.8 ± 2.3 |
| 3h-56-269 | 0.14 ± 0.02 | | 15.0 ± 5.0 | 9.7 ± 1.9 | 1.8 ± 1.2 |
| 3h-56-270 | 0.31 ± 0.1 | | | | |
| 3h-56-5 | 6.0 ± 4.0 | >7000 | | | |
| 3h-56-6 | 4.0 ± 3.0 | | | | |
| 3h-56-7 | 8.0 ± 6.0 | | | | |
| 3h-56-8 | 5.0 ± 2.0 | | | | |
| 3h-56-9 | 3.0 ± 0.6 | | | | |
| 3h-56-15 | 2.0 ± 0.9 | | | | |
| 3h-56-19 | 3.0 ± 2.0 | | | | |
| 3h-56-21 | 2.0 ± 1.0 | | | | |
| 3h-131 | 2700.0 ± 1000.0 | >7000 | | | |
| 3h-131-2 | 55.0 ± 53.0 | >7000 | | | |
| 3h-131-6 | 141.0 ± 37.0 | | | | |
| 3h-131-14 | 24.0 ± 4.0 | | | | |
| 3h-193 | >7000 | | | | |
| 3h-193-12 | 277.0 ± 167.0 | | | | |
| 3h-193-16 | 387.0 ± 173.0 | | | | |
| 3h-193-19 | 233.0 ± 110.0 | | | | |
| 3h-193-25 | 303.0 ± 214.0 | 2200.0 ± 1200.0 | | | |
| 3h-193-29 | 1380.0 ± 721.0 | | | | |
| 3h-198 | 554.0 ± 186.0 | >7000 | | | |
| 3h-198-1 | 64.0 ± 47.0 | | | | |
| 3h-198-2 | 207.0 ± 158.0 | | | | |
| 3h-198-5 | 9.0 ± 6.0 | | | | |
| 3h-198-19 | 19.0 ± 14.0 | | | | |
| 3h-198-24 | 34.0 ± 37.0 | | | | |
| 3h-198-28 | 20.0 ± 9.0 | | | | |
| 3h-202 | 6400.0 ± 1300.0 | >7000 | | | |
| 3h-202-1 | 192.0 ± 77.0 | >7000 | | | |
| 3h-202-5 | 6500.0 ± 1000.0 | | | | |
| 3h-202-10 | 289.0 ± 158.0 | | | | |
| 3h-202-11 | 201.0 ± 103.0 | | | | |
| 3h-217 | 3200.0 ± 2030.0 | >7000, 5300, | | | |
| | | 1690 | | | |
| 3h-217-1 | 45.0 ± 26.0 | 35.0 ± 8.0 | | | |
| 3h-217-2 | 8.0 ± 4.0 | 7.0 | | | 335.0 |
| 3h-217-4 | 61.0 ± 20.0 | 27.0 | | | |
| 3h-217-5 | 13.0 ± 5.0 | 15.0 | | | |
| 3h-217-6 | 11.0 ± 3.0 | 10.0 | | | |
| 3h-217-7 | 220.0 ± 20.0 | | | | |
| 3h-217-8 | 33.0 ± 10.0 | 14.0 | | | |
| 3h-217-9 | 380.0 ± 170.0 | | | | |
| 3h-217-14 | 26.0 ± 10.0 | 8.0 | | | |
| 3h-217-15 | 47.0 ± 21.0 | 20.0 | | | |
| 3h-217-16 | 5.0 ± 2.0 | 7.0 | | | 1125.0 |
| 3h-217-17 | 1950.0 ± 110.0 | | | | |
| 3h-217-23 | 16.0 ± 6.0 | 15.0 | | | |
| 3h-217-2305 | 11.0 ± 4.0 | | | | |
| 3h-217-30 | 80.0 ± 9.0 | | | | >7700 |
| 3h-217-31 | >700.0 | | | | |
| 3h-231 | 328.0 ± 144.0 | >7000 | | | |
| 3h-233 | 184.0 ± 75.0 | >7000 | | | 1492.0, >2000 |
| 3h-240 | >7000 | >7000 | | | |
| 3h-242 | 219.0 ± 53.0 | 435.0 ± 62.0 | | | 2050.0 |
| 3h-257 | 135.0 ± 28.0 | >7000 | | | 704.0 ± 445.0 |
| 3h-262 | 548.0 ± 121.0 | >700 | | | 998.0 |
| 3h-263 | >700.0 | >700 | | | |
| 3h-264 | 1200.0 ± 400.0 | >7000 | | | >2000 |
| 3h-265 | 2400.0 ± 1000.0 | >7000 | | | >2000 |
| 3h-271 | 295.0 ± 92.0 | 446.0 | | | >2000 |
| 3h-274 | 1200, >7000 | >7000 | | | |
| 3h-275 | 157.0 ± 11.0 | >7000 | | | |
| 3h-285 | 49.0 ± 0.7 | 155.0 | | | |
| 3h-287 | 287.0 ± 156.0 | 918.0 | | | |
| 3h-289 | 2300.0 ± 1200.0 | 4300.0 | | | |
| 3h-290 | >7000 | 5650.0 | | | |
| 3h-294 | >7000 | >7000 | | | |
| 3h-295 | >7000 | >7000 | | | |
| 3h-296 | 306.0 ± 55.0 | >7000 | | | |
| 3h-309 | 648.0 ± 268.0 | 838.0 | | | |
| 3h-312 | 1100.0 ± 346.0 | >7000 | | | |

### Example 7

### Dual Specific dAbs Binding CD40 and Serum Albumin

[0191] Dual specific dAbs that specifically bind CD40 and human serum albumin (HSA) or cynomolgus serum albumin (CSA) were constructed and tested for activity in cell-based assays. The albumin-specific dAbs are called “AlbudAbs.” In this example, AlbudAb fusions comprise a BMS3h dAb that binds CD40 and another domain antibody, DOM7h, that recognizes HSA. The two dAbs are fused in frame to the amino and carboxyl termini of an amino acid linker to form an inline fusion (ILF) polypeptide. The ILF polypeptide is expressed recombinantly as a single fusion protein. RBAs demonstrating activity of the AlbudAb ILFs are described below, and the results are shown in TABLE 18. TABLE 19 summarizes the linker sequences used in the tested AlbudAb ILFs. Kinetic binding data determined by a BIAcore™ assay are shown in TABLE 20.

Human CD40 CHO Cell ELISA for the Detection of dAbs in a Supernatant:

[0192] Stably transfected human CD40 expressing CHO-DG44 cells or native CHO-DG44 cells (both BMS) were detached from cell culture flasks using 0.25% trypsin EDTA, and 100,000 cells per well were seeded in growth media into 96 well tissue culture treated plates (NUNC). The cells were allowed to adhere overnight in a humidified atmosphere at 37° C., 5% CO₂. On the day of assay, the cell sheet was washed with PBS prior to being fixed with 2% paraformaldehyde (Sigma-Aldrich) for 20 minutes. Following fixing, the cell sheet was washed again in PBS prior to a 1 hr blocking step with 15% fetal bovine serum (FBS, PAA) in PBS. Plates were washed once more prior to addition of 100 μl/well of dAb supernatant and incubated for 2 h at room temperature. Following incubation of dAb supernatants with cells, the plates were washed and dAb binding was detected with incubation of horse radish peroxidase (HRP) conjugate anti-protein A or L, depending on whether dAbs are V_{H} or V_{L} domains. Absorbance signal was measured using a SpectraMax M5^{e} plate reader (Molecular Devices) at 450 nm following neutralization with 1 M HCl.

### ICAM-1 Up-Regulation Cell Assay:

[0193] Stably transfected human CD40L expressing COS cells were detached from cell culture flasks using Versene (Invitrogen). 20,000 cells per well were seeded into 96 well Highbind, black walled, clear bottom plates (Corning, UK) in assay buffer (RPMI 1640 without phenol red (Sigma-Aldrich, UK)+1% penicillin/streptomycin+10% FBS Gold (both PAA Laboratories, UK). The cells were left to adhere overnight in a humidified atmosphere at 37° C. with 5% CO₂. The following day, exhausted assay buffer containing non attached cells was replenished with 100 μl of fresh assay buffer. To this, 20,000 RAMOS cells/well were added in assay buffer in addition to a dilution range of dAb. The assay plate was returned to a humidified atmosphere at 37° C. with 5% CO₂ for a further 24 hours. For negative control wells, no RAMOS cells were added. The ability of dAb to inhibit the up-regulation of ICAM-1 on the cell surface of RAMOS cells in response to exposure to CD40L on the cell surface of COS cells was assessed by addition of 0.5 μg/ml mouse anti human ICAM-1 antibody (R&D systems) and 0.2 μg/ml goat anti mouse ALEXA flour 647(Invitrogen, Molecular probes, UK). Following a 3 hour incubation period in the absence of light, relative fluorescence was detected as measured by the AB8200 cellular detection platform (Applied Biosystems).

### Analysis of Inline Fusion (ILF) Kinetics of Binding to Serum Albumin:

[0194] A BIAcore™ 3000 instrument (GE Healthcare) was used to analyze the binding kinetics of anti-CD40-AlbudAb ILFs to human and cynomolgus serum albumin. Approximately 400 response units (RU) of human serum albumin (HSA) or cynomolgus serum albumin (CSA) were immobilized on a flow-cell of a CM5 BIAcore™ chip using an Amine Coupling Kit (GE Healthcare). A second flow cell without any ligand immobilized served as a reference flow-cell for inline referencing. An appropriate doubling dilution series of each dAb to be analyzed was prepared in HBS-EP buffer (0.01 M HEPES pH 7.4 with 0.15 M NaCl, 3 mM EDTA and 0.005% v/v Surfactant P20, GE Healthcare). Two hundred microlitres of each ILF were injected in duplicate using the instrument's KINJECT function. The injections were made across the serum albumin-immobilized and reference flow-cells in series, with inline subtraction of the signal from the reference cell. The experiment was performed at 25° C. and a flow rate of 40 μl/min of HBS-EP. After each injection had been completed, the dAb was allowed to dissociate from the ligand in buffer for 120 s before regeneration with a 10 μl injection of 10 mM glycine pH 2.0. A reference injection of HBS-EP buffer blank (containing no analyte) was also injected under the same conditions to serve as a second reference for subtraction from each analyte trace. BlAevaluation 4.1 software (GE Healthcare) was used to subtract both the reference flow-cell trace and the buffer blank trace from each analyte trace. The same software was used to perform a simultaneous, global fit of a 1:1 (Langmuir) kinetic model to the association and dissociation phases of the analyte dilution series traces. This model yielded association and dissociation rate constants (kₐ and k_{d}, respectively) and the equilibrium dissociation constant (K_{D}) of the interaction. The parameter values are shown in TABLE 20.

TABLE 18
Activity Assays

| | | | | CHO-CD40 | | | |
|---|---|---|---|---|---|---|---|
| | | | | Cell RBA | | ICAM-1 Cell Assay | |
| | | | | EC₅₀ (nM) | | EC₅₀ (nM) | |
| | | | | 0.1% | 50 μM | 10% bovine | 10% human |
| DMS No. | N-term. dAb | Linker | C-term. dAb | BSA | HSA | serum | serum |
| DMS0654 | BMS3h-56-201 | AST | DOM7h-11-3 | 15 | 8.6 | | |
| DMS0655 | BMS3h-56-201 | AST | DOM7h-11-87 | 6.3 | 2.7 | | |
| DMS0656 | BMS3h-56-258 | AST | DOM7h-11-3 | 11.8 | 26.8 | | |
| DMS0657 | BMS3h-56-258 | AST | DOM7h-11-87 | 6.8 | 16.6 | | |
| DMS0658 | DOM7h-11-3 | TVAAPS | BMS3h-56-201 | 12.2 | 9.1 | | |
| DMS0659 | DOM7h-11-87 | TVAAPS | BMS3h-56-201 | 7.2 | 3.3 | | |
| DMS0660 | DOM7h-11-3 | TVAAPS | BMS3h-56-258 | 21.8 | 13.1 | | |
| DMS0661 | DOM7h-11-87 | TVAAPS | BMS3h-56-258 | 4.1 | 5.7 | | |
| DMS0662 | DOM7h-11-90 | TVAAPS | BMS3h-56-201 | | | 33.5 | >1000 |
| DMS0663 | DOM7h-11-86 | TVAAPS | BMS3h-56-201 | | | 21.4 | >1000 |
| DMS0664 | DOM7h-11-69 | TVAAPS | BMS3h-56-201 | | | 16.5 | >1000 |
| DMS0677 | DOM7h-11-90 | TVA | BMS3h-56-258 | | | 21.7 | 20.35 |
| DMS0679 | DOM7h-11-90 | G₄S | BMS3h-56-258 | | | 21.7 | 39.2 |
| DMS0680 | DOM7h-11-90 | (G₄S)₃ | BMS3h-56-258 | | | 39.3 | 74.2 |
| DMS0681 | DOM7h-11-90 | (G₄S)₅ | BMS3h-56-258 | | | 43.6 | 53.3 |
| DMS0682 | BMS3h-56-258 | TVA | DOM7h-11-90 | | | 10.2 | 94.8 |
| DMS0683 | BMS3h-56-258 | ASTSGPS | DOM7h-11-90 | | | 32.4 | 50.9 |
| DMS0684 | BMS3h-56-258 | G₄S | DOM7h-11-90 | | | 37.9 | 74.3 |
| DMS0685 | BMS3h-56-258 | (G₄S)₃ | DOM7h-11-90 | | | 31.9 | 62.4 |
| DMS0686 | BMS3h-56-258 | (G₄S)₅ | DOM7h-11-90 | | | 48.3 | 66.6 |

TABLE 19
Representative Linker Sequences

| | |
|---|---|
| AST | SEQ ID NO: 5 |
| TVAAPS | SEQ ID NO: 6 |
| TVA | SEQ ID NO: 7 |
| GGGGS | SEQ ID NO: 1207 |
| (GGGGS)₃ | SEQ ID NO: 1208 |
| (GGGGS)₅ | SEQ ID NO: 1209 |
| ASTSGPS | SEQ ID NO: 8 |

TABLE 20
BIAcore ™ Analysis

| | | Linker | | | | | | | |
|---|---|---|---|---|---|---|---|---|---|
| | | (“TVAAPS” | | Human Serum Albumin | | | Cyno Serum Albumin | | |
| | N-Term | disclosed as SEQ | C-Term | kₐ (1/Ms) | k_{d} (1/s) | | kₐ (1/Ms) | k_{d} (1/s) | |
| DMS No. | dAb | ID NO: 6) | dAb | ×10⁻⁶ | ×10³ | K_{D} (nM) | ×10⁻⁶ | ×10³ | K_{D} (nM) |
| DMS0659 | DOM7h- | TVAAPS | BMS3h- | 0.85, | 1.17, | 1.37, | 0.85, | 2.37, | 2.79, |
| | 11-87 | | 56-201 | 2.85, 2.6 | 1.69, 1.2 | 0.60, 0.45 | 2.79, 2.9 | 3.37, 2.4 | 1.21, 0.83 |
| DMS0662 | DOM7h- | TVAAPS | BMS3h- | 1.1, 1.19 | 1.33, 1.47 | 1.21, 1.23 | 1.01, 1.10 | 2.52, 2.66 | 2.5, 2.42 |
| | 11-90 | | 56-201 | | | | | | |
| DMS0663 | DOM7h- | TVAAPS | BMS3h- | 1.25, 1.32 | 1.40, 1.60 | 1.12, 1.21 | 1.18, 1.18 | 2.81, 2.96 | 2.38, 2.52 |
| | 11-86 | | 56-201 | | | | | | |
| DMS0664 | DOM7h- | TVAAPS | BMS3h- | 2.5, 0.93 | 1.42, 1.49 | 0.57, 1.59 | 2.51, 0.92 | 2.73, 2.72 | 1.09, 2.97 |
| | 11-69 | | 56-201 | | | | | | |

[0195] TABLE 21 lists amino acid sequences of representative AlbudAb ILFs that can specifically bind CD40 and HSA or CSA. The designation of each ILF identifies the particular linker sequence: “G×S” means the linker has “x” residues of glycine followed by serine, and “(G×S)y” means the linker has y repeating units of G×S. TABLE 22 discloses representative nucleic acids that encode the ILF sequences listed in TABLE 21. As is known in the art, multiple codons can encode the same amino acid. Nucleic acids encoding a protein sequence thus include nucleic acids having codon degeneracy.

TABLE 21
Dual Specificity dAb Amino Acid Sequences
(Table 21 discloses “AST,” “TVAAPS,” “TVA,” “G4S,”
“(G4S)3,” “(G4S)5,” and “ASTSGPS” disclosed
as SEQ ID NOS 5-7, 1207-1209 and 8, respectively)

DMS0654 BMS3h-56-201-AST-DOM7h-11-3
EVQLLESGGGLVQPGGSLRLSCAASGFTFRDYEMWWVRQAPGKGLERVSAINPQGTRTY
YADSVKGRFTISRDNSKNTLYLQMNSLRAEDTAVYYCAKLPFYFQEWGQGTLVTVSSAS
TDIQMTQSPSSLSASVGDRVTITCRASRPIGTTLSWYQQKPGKAPKLLILWNSRLQSGV
PSRFSGSGSGTDFTLTISSLQPEDFATYYCAQAGTHPTTFGQGTKVEIKR (SEQ ID
NO: 1210)
DMS0655 BMS3h-56-201-AST-DOM7h-11-87
EVQLLESGGGLVQPGGSLRLSCAASGFTFRDYEMWWVRQAPGKGLERVSAINPQGTRTY
YADSVKGRFTISRDNSKNTLYLQMNSLRAEDTAVYYCAKLPFYFQEWGQGTLVTVSSAS
TDIQMTQSPSSLSASVGDRVTITCRASRPIGTMLSWYQQKPGKAPKLLILAFSRLQSGV
PSRFSGSGSGTDFTLTISSLQPEDFATYYCAQAGTHHTTFGQGTKVEIKR (SEQ ID
NO: 1211)
DMS0656 BMS3h-56-258-AST-DOM7h-11-3
EVQLLESGGGLVQPGGSLRLSCAASGFTFRDYEMWWVRQAPGKGLERVSAINPQGTRTY
YADSVKGRFTISRDNSKNTLYLQMNSLRAEDTAVYYCAKLPFYFHEWGQGTLVTVSSAS
TDIQMTQSPSSLSASVGDRVTITCRASRPIGTTLSWYQQKPGKAPKLLILWNSRLQSGV
PSRFSGSGSGTDFTLTISSLQPEDFATYYCAQAGTHPTTFGQGTKVEIKR (SEQ ID
NO: 1212)
DMS0657 BMS3h-56-258-AST-DOM7h-11-87
EVQLLESGGGLVQPGGSLRLSCAASGFTFRDYEMWWVRQAPGKGLERVSAINPQGTRTY
YADSVKGRFTISRDNSKNTLYLQMNSLRAEDTAVYYCAKLPFYFHEWGQGTLVTVSSAS
TDIQMTQSPSSLSASVGDRVTITCRASRPIGTMLSWYQQKPGKAPKLLILAFSRLQSGV
PSRFSGSGSGTDFTLTISSLQPEDFATYYCAQAGTHHTTFGQGTKVEIKR (SEQ ID
NO: 1213)
DMS0658 DOM7h-11-3-TVAAPS-BMS3h-56-201
DIQMTQSPSSLSASVGDRVTITCRASRPIGTTLSWYQQKPGKAPKLLILWNSRLQSGVP
SRFSGSGSGTDFTLTISSLQPEDFATYYCAQAGTHPTTFGQGTKVEIKRTVAAPSEVQL
LESGGGLVQPGGSLRLSCAASGFTFRDYEMWWVRQAPGKGLERVSAINPQGTRTYYADS
VKGRFTISRDNSKNTLYLQMNSLRAEDTAVYYCAKLPFYFQEWGQGTLVTVSS (SEQ
ID NO: 1214)
DMS0659 DOM7h-11-87-TVAAPS-BMS3h-56-201
DIQMTQSPSSLSASVGDRVTITCRASRPIGTMLSWYQQKPGKAPKLLILAFSRLQSGVP
SRFSGSGSGTDFTLTISSLQPEDFATYYCAQAGTHHTTFGQGTKVEIKRTVAAPSEVQL
LESGGGLVQPGGSLRLSCAASGFTFRDYEMWWVRQAPGKGLERVSAINPQGTRTYYADS
VKGRFTISRDNSKNTLYLQMNSLRAEDTAVYYCAKLPFYFQEWGQGTLVTVSS (SEQ
ID NO: 1215)
DMS0660 DOM7h-11-3-TVAAPS-BMS3h-56-258
DIQMTQSPSSLSASVGDRVTITCRASRPIGTTLSWYQQKPGKAPKLLILWNSRLQSGVP
SRFSGSGSGTDFTLTISSLQPEDFATYYCAQAGTHPTTFGQGTKVEIKRTVAAPSEVQL
LESGGGLVQPGGSLRLSCAASGFTFRDYEMWWVRQAPGKGLERVSAINPQGTRTYYADS
VKGRFTISRDNSKNTLYLQMNSLRAEDTAVYYCAKLPFYFHEWGQGTLVTVSS (SEQ
ID NO: 1216)
DMS0661 DOM7h-11-87-TVAAPS-BMS3h-56-258
DIQMTQSPSSLSASVGDRVTITCRASRPIGTMLSWYQQKPGKAPKLLILAFSRLQSGVP
SRFSGSGSGTDFTLTISSLQPEDFATYYCAQAGTHHTTFGQGTKVEIKRTVAAPSEVQL
LESGGGLVQPGGSLRLSCAASGFTFRDYEMWWVRQAPGKGLERVSAINPQGTRTYYADS
VKGRFTISRDNSKNTLYLQMNSLRAEDTAVYYCAKLPFYFHEWGQGTLVTVSS (SEQ
ID NO: 1217)
DMS0662 DOM7h-11-90-TVAAPS-BMS3h-56-201
DIQMTQSPSSLSASVGDRVTITCRASRPIGTMLSWYQQKPGKAPKLLILAFSRLQSGVP
SRFSGSGSGTDFTLTISNLQPEDFATYYCAQAGTHPTTFGQGTKVEIKRTVAAPSEVQL
LESGGGLVQPGGSLRLSCAASGFTFRDYEMWWVRQAPGKGLERVSAINPQGTRTYYADS
VKGRFTISRDNSKNTLYLQMNSLRAEDTAVYYCAKLPFYFQEWGQGTLVTVSS (SEQ
ID NO: 1218)
DMS0663 DOM7h-11-86-TVAAPS-BMS3h-56-201
DIQMTQSPSSLSASVGDRVTITCRASRPIGTMLSWYQQKPGKAPKLLILAFSRLQSGVP
SRFSGSGSGTDFTLTISSLQPEDVATYYCAQAGTHPTTFGQGTKVEIKRTVAAPSEVQL
LESGGGLVQPGGSLRLSCAASGFTFRDYEMWWVRQAPGKGLERVSAINPQGTRTYYADS
VKGRFTISRDNSKNTLYLQMNSLRAEDTAVYYCAKLPFYFQEWGQGTLVTVSS (SEQ
ID NO: 1219)
DMS0664 DOM7h-11-69-TVAAPS-BMS3h-56-201
DIQMTQSPSSLSASVGDRVTITCRASRPIGTMLSWYQQKPGKAPKLLILAFSRLQSGVP
SRFSGSGSGTDFTLTISSLQPEDEATYYCAQAGVHPTTFGQGTKVEIKRTVAAPSEVQL
LESGGGLVQPGGSLRLSCAASGFTERDYEMWWVRQAPGKGLERVSAINPQGTRTYYADS
VKGRFTISRDNSKNTLYLQMNSLRAEDTAVYYCAKLPFYFQEWGQGTLVTVSS (SEQ
ID NO: 1220)
DMS0667 DOM7h-11-3-TVAAPS-BMS3h-38-240
DIQMTQSPSSLSASVGDRVTITCRASRPIGTTLSWYQQKPGKAPKLLILWNSRLQSGVP
SRFSGSGSGTDFTLTISSLQPEDFATYYCAQAGTHPTTFGQGTKVEIKRTVAAPSEVQL
LESGGGLVQPGGSLRLSCAASGFTFEEEEMIWVRQAPGKGLEWVSAISRNGYSTYYADS
VKGRFTISRDNSKNTLYLQMNSLRAEDTAVYYCGKEPFRYDYWGQGTLVTVSS (SEQ
ID NO: 1221)
DMS0668 BMS3h-38-240-AST-DOM7h-11-3
EVQLLESGGGLVQPGGSLRLSCAASGFTFEEEEMIWVRQAPGKGLEWVSAISRNGYSTY
YADSVKGRFTISRDNSKNTLYLQMNSLRAEDTAVYYCGKEPFRYDYWGQGTLVTVSSAS
TDIQMTQSPSSLSASVGDRVTITCRASRPIGTTLSWYQQKPGKAPKLLILWNSRLQSGV
PSRFSGSGSGTDFTLTISSLQPEDFATYYCAQAGTHPTTFGQGTKVEIKR (SEQ ID
NO: 1222)
DMS0669 DOM7h-14-10-TVAAPS-BMS3h-38-240
DIQMTQSPSSLSASVGDRVTITCRASQWIGSQLSWYQQKPGKAPKLLIMWRSSLQSGVP
SRFSGSGSGTDFTLTISSLQPEDFATYYCAQGLRHPKTFGQGTKVEIKRTVAAPSEVQL
LESGGGLVQPGGSLRLSCAASGFTFEEEEMIWVRQAPGKGLEWVSAISRNGYSTYYADS
VKGRFTISRDNSKNTLYLQMNSLRAEDTAVYYCGKEPFRYDYWGQGTLVTVSS (SEQ
ID NO: 1223)
DMS0670 BMS3h-38-240-AST-DOM7h-14-10
EVQLLESGGGLVQPGGSLRLSCAASGFTFEEEEMIWVRQAPGKGLEWVSAISRNGYSTY
YADSVKGRFTISRDNSKNTLYLQMNSLRAEDTAVYYCGKEPFRYDYWGQGTLVTVSSAS
TDIQMTQSPSSLSASVGDRVTITCRASQWIGSQLSWYQQKPGKAPKLLIMWRSSLQSGV
PSRFSGSGSGTDFTLTISSLQPEDFATYYCAQGLRHPKTFGQGTKVEIKR (SEQ ID
NO: 1224)
DMS0671 BMS3h-38-235-AST-DOM7h-11-3
EVQLLASGGGLVQPGGSLRLSCAASGFTFEEEEMIWVRQAPGKGLEWVSAISRNGYSTY
YADSVKGRFTISRDNSKNTLYLQMNSLRAEDTAVYYCGKEPFRYDYWGQGTLVTVSSAS
TDIQMTQSPSSLSASVGDRVTITCRASRPIGTTLSWYQQKPGKAPKLLILWNSRLQSGV
PSRFSGSGSGTDFTLTISSLQPEDFATYYCAQAGTHPTTFGQGTKVEIKR (SEQ ID
NO: 1225)
DMS0672 BMS3h-38-235-AST-DOM7h-11-90
EVQLLASGGGLVQPGGSLRLSCAASGFTFEEEEMIWVRQAPGKGLEWVSAISRNGYSTY
YADSVKGRFTISRDNSKNTLYLQMNSLRAEDTAVYYCGKEPFRYDYWGQGTLVTVSSAS
TDIQMTQSPSSLSASVGDRVTITCRASRPIGTMLSWYQQKPGKAPKLLILAFSRLQSGV
PSRFSGSGSGTDFTLTISNLQPEDFATYYCAQAGTHPTTFGQGTKVEIKR (SEQ ID
NO: 1226)
DMS0674 DOM7h-11-3-TVAAPS-BMS3h-38-235
DIQMTQSPSSLSASVGDRVTITCRASRPIGTTLSWYQQKPGKAPKLLILWNSRLQSGVP
SRFSGSGSGTDFTLTISSLQPEDFATYYCAQAGTHPTTFGQGTKVEIKRTVAAPSEVQL
LASGGGLVQPGGSLRLSCAASGFTFEEEEMIWVRQAPGKGLEWVSAISRNGYSTYYADS
VKGRFTISRDNSKNTLYLQMNSLRAEDTAVYYCGKEPFRYDYWGQGTLVTVSS (SEQ
ID NO: 1227)
DMS0675 DOM7h-11-90-TVAAPS-BMS3h-38-235
DIQMTQSPSSLSASVGDRVTITCRASRPIGTMLSWYQQKPGKAPKLLILAFSRLQSGVP
SRFSGSGSGTDFTLTISNLQPEDFATYYCAQAGTHPTTFGQGTKVEIKRTVAAPSEVQL
LASGGGLVQPGGSLRLSCAASGFTFEEEEMIWVRQAPGKGLEWVSAISRNGYSTYYADS
VKGRFTISRDNSKNTLYLQMNSLRAEDTAVYYCGKEPFRYDYWGQGTLVTVSS (SEQ
ID NO: 1228)
DMS0677 DOM7h-11-90-TVA-BMS3h-56-258
DIQMTQSPSSLSASVGDRVTITCRASRPIGTMLSWYQQKPGKAPKLLILAFSRLQSGVP
SRFSGSGSGTDFTLTISNLQPEDFATYYCAQAGTHPTTFGQGTKVEIKRTVAEVQLLES
GGGLVQPGGSLRLSCAASGFTFRDYEMWWVRQAPGKGLERVSAINPQGTRTYYADSVKG
RFTISRDNSKNTLYLQMNSLRAEDTAVYYCAKLPFYFHEWGQGTLVTVSS (SEQ ID
NO: 1229)
DMS0678 DOM7h-11-90-ASTSGPS-BMS3h-56-258
DIQMTQSPSSLSASVGDRVTITCRASRPIGTMLSWYQQKPGKAPKLLILAFSRLQSGVP
SRFSGSGSGTDFTLTISNLQPEDFATYYCAQAGTHPTTFGQGTKVEIKRASTSGPSEVQ
LLESGGGLVQPGGSLRLSCAASGFTFRDYEMWWVRQAPGKGLERVSAINPQGTRTYYAD
SVKGRFTISRDNSKNTLYLQMNSLRAEDTAVYYCAKLPFYFHEWGQGTLVTVSS (SEQ
ID NO: 1230)
DMS0679 DOM7h-11-90-G4S-BMS3h-56-258
DIQMTQSPSSLSASVGDRVTITCRASRPIGTMLSWYQQKPGKAPKLLILAFSRLQSGVP
SRFSGSGSGTDFTLTISNLQPEDFATYYCAQAGTHPTTFGQGTKVEIKRGGGGSEVQLL
ESGGGLVQPGGSLRLSCAASGFTFRDYEMWWVRQAPGKGLERVSAINPQGTRTYYADSV
KGRFTISRDNSKNTLYLQMNSLRAEDTAVYYCAKLPFYFHEWGQGTLVTVSS (SEQ
ID NO: 1231)
DMS0680 DOM7h-11-90-(G4S)3-BMS3h-56-258
DIQMTQSPSSLSASVGDRVTITCRASRPIGTMLSWYQQKPGKAPKLLILAFSRLQSGVP
SRFSGSGSGTDFTLTISNLQPEDFATYYCAQAGTHPTTFGQGTKVEIKRGGGGSGGGGS
GGGGSEVQLLESGGGLVQPGGSLRLSCAASGFTFRDYEMWWVRQAPGKGLERVSAINPQ
GTRTYYADSVKGRFTISRDNSKNTLYLQMNSLRAEDTAVYYCAKLPFYFHEWGQGTLVT
VSS (SEQ ID NO: 1232)
DMS0681 DOM7h-11-90-(G4S)5-BMS3h-56-258
DIQMTQSPSSLSASVGDRVTITCRASRPIGTMLSWYQQKPGKAPKLLILAFSRLQSGVP
SRFSGSGSGTDFTLTISNLQPEDFATYYCAQAGTHPTTFGQGTKVEIKRGGGGSGGGGS
GGGGSGGGGSGGGGSEVQLLESGGGLVQPGGSLRLSCAASGFTFRDYEMWWVRQAPGKG
LERVSAINPQGTRTYYADSVKGRFTISRDNSKNTLYLQMNSLRAEDTAVYYCAKLPFYF
HEWGQGTLVTVSS (SEQ ID NO: 1233)
DMS0682 BMS3h-56-258-TVA-DOM7h-11-90
EVQLLESGGGLVQPGGSLRLSCAASGFTFRDYEMWWVRQAPGKGLERVSAINPQGTRTY
YADSVKGRFTISRDNSKNTLYLQMNSLRAEDTAVYYCAKLPFYFHEWGQGTLVTVSSTV
ADIQMTQSPSSLSASVGDRVTITCRASRPIGTMLSWYQQKPGKAPKLLILAFSRLQSGV
PSRFSGSGSGTDFTLTISNLQPEDFATYYCAQAGTHPTTFGQGTKVEIKR (SEQ ID
NO: 1234)
DMS0683 BMS3h-56-258-ASTSGPS-DOM7h-11-90
EVQLLESGGGLVQPGGSLRLSCAASGFTFRDYEMWWVRQAPGKGLERVSAINPQGTRTY
YADSVKGRFTISRDNSKNTLYLQMNSLRAEDTAVYYCAKLPFYFHEWGQGTLVTVSSAS
TSGPSDIQMTQSPSSLSASVGDRVTITCRASRPIGTMLSWYQQKPGKAPKLLILAFSRL
QSGVPSRFSGSGSGTDFTLTISNLQPEDFATYYCAQAGTHPTTFGQGTKVEIKR (SEQ
ID NO: 1235)
DMS0684 BMS3h-56-258-G4S-DOM7h-11-90
EVQLLESGGGLVQPGGSLRLSCAASGFTFRDYEMWWVRQAPGKGLERVSAINPQGTRTY
YADSVKGRFTISRDNSKNTLYLQMNSLRAEDTAVYYCAKLPFYFHEWGQGTLVTVSSGG
GGSDIQMTQSPSSLSASVGDRVTITCRASRPIGTMLSWYQQKPGKAPKLLILAFSRLQS
GVPSRFSGSGSGTDFTLTISNLQPEDFATYYCAQAGTHPTTFGQGTKVEIKR (SEQ
ID NO: 1236)
DMS0685 BMS3h-56-258-(G4S)3-DOM7h-11-90
EVQLLESGGGLVQPGGSLRLSCAASGFTFRDYEMWWVRQAPGKGLERVSAINPQGTRTY
YADSVKGRFTISRDNSKNTLYLQMNSLRAEDTAVYYCAKLPFYFHEWGQGTLVTVSSGG
GGSGGGGSGGGGSDIQMTQSPSSLSASVGDRVTITCRASRPIGTMLSWYQQKPGKAPKL
LILAFSRLQSGVPSRFSGSGSGTDFTLTISNLQPEDFATYYCAQAGTHPTTFGQGTKVE
IKR (SEQ ID NO: 1237)
DMS0686 BMS3h-56-258-(G4S)5-DOM7h-11-90
EVQLLESGGGLVQPGGSLRLSCAASGFTFRDYEMWWVRQAPGKGLERVSAINPQGTRTY
YADSVKGRFTISRDNSKNTLYLQMNSLRAEDTAVYYCAKLPFYFHEWGQGTLVTVSSGG
GGSGGGGSGGGGSGGGGSGGGGSDIQMTQSPSSLSASVGDRVTITCRASRPIGTMLSWY
QQKPGKAPKLLILAFSRLQSGVPSRFSGSGSGTDFTLTISNLQPEDFATYYCAQAGTHP
TTFGQGTKVEIKR (SEQ ID NO: 1238)
DMS0688 DOM7h-11-90-TVAAPS-BMS3h-56-258
DIQMTQSPSSLSASVGDRVTITCRASRPIGTMLSWYQQKPGKAPKLLILAFSRLQSGVP
SRFSGSGSGTDFTLTISNLQPEDFATYYCAQAGTHPTTFGQGTKVEIKRTVAAPSEVQL
LESGGGLVQPGGSLRLSCAASGFTFRDYEMWWVRQAPGKGLERVSAINPQGTRTYYADS
VKGRFTISRDNSKNTLYLQMNSLRAEDTAVYYCAKLPFYFHEWGQGTLVTVSS (SEQ
ID NO: 1239)

TABLE 22
Polynucleotides Encoding Dual Specificity dAbs
(Table 22 discloses “AST,” “TVAAPS,” “TVA,” “G4S,”
“(G4S)3,” “(G4S)5,” and “ASTSGPS” disclosed as
SEQ ID NOS 5-7, 1207-1209 and 8, respectively)

DMS0654 BMS3h-56-201-AST-DOM7h-11-3
GAGGTGCAGCTGTTGGAGTCTGGGGGAGGCTTGGTACAGCCTGGGGGGTCCCTGCGTCTC
TCCTGTGCAGCCTCCGGATTCACCTTTCGGGATTATGAGATGTGGTGGGTCCGCCAGGCT
CCAGGGAAGGGTCTAGAGCGGGTCTCAGCTATTAATCCGCAGGGTACGCGTACATACTAC
GCAGACTCCGTGAAGGGCCGGTTCACCATCTCCCGCGACAATTCCAAGAACACGCTGTAT
CTGCAAATGAACAGCCTGCGTGCCGAGGACACCGCGGTATATTACTGTGCGAAACTTCCG
TTTTACTTTCAGGAGTGGGGTCAGGGAACCCTGGTCACCGTCTCGAGCGCTAGCACCGAC
ATCCAGATGACCCAGTCTCCATCCTCCCTGTCTGCATCTGTAGGAGACCGTGTCACCATC
ACTTGCCGGGCAAGTCGTCCGATTGGGACGACGTTAAGTTGGTACCAGCAGAAACCAGGG
AAAGCCCCTAAGCTCCTGATCCTTTGGAATTCCCGTTTGCAAAGTGGGGTCCCATCACGT
TTCAGTGGCAGTGGATCTGGGACAGATTTCACTCTCACCATCAGCAGTCTGCAACCTGAA
GATTTTGCTACGTACTACTGTGCGCAGGCTGGGACGCATCCTACGACGTTCGGCCAAGGG
ACCAAGGTGGAAATCAAACGG (SEQ ID NO: 1240)
DMS0655 BMS3h-56-201-AST-DOM7h-11-87
GAGGTGCAGCTGTTGGAGTCTGGGGGAGGCTTGGTACAGCCTGGGGGGTCCCTGCGTCTC
TCCTGTGCAGCCTCCGGATTCACCTTTCGGGATTATGAGATGTGGTGGGTCCGCCAGGCT
CCAGGGAAGGGTCTAGAGCGGGTCTCAGCTATTAATCCGCAGGGTACGCGTACATACTAC
GCAGACTCCGTGAAGGGCCGGTTCACCATCTCCCGCGACAATTCCAAGAACACGCTGTAT
CTGCAAATGAACAGCCTGCGTGCCGAGGACACCGCGGTATATTACTGTGCGAAACTTCCG
TTTTACTTTCAGGAGTGGGGTCAGGGAACCCTGGTCACCGTCTCGAGCGCTAGCACCGAC
ATCCAGATGACCCAGTCTCCATCCTCCCTGTCTGCATCTGTAGGAGACCGTGTCACCATC
ACTTGCCGGGCAAGTCGTCCGATTGGGACGATGTTAAGTTGGTACCAGCAGAAACCAGGG
AAAGCCCCTAAGCTCCTGATCCTTGCTTTTTCCCGTTTGCAAAGTGGGGTCCCATCACGT
TTCAGTGGCAGTGGATCTGGGACAGATTTCACTCTCACCATCAGCAGTCTGCAACCTGAA
GATTTTGCTACGTACTACTGTGCGCAGGCTGGGACGCATCATACGACGTTCGGCCAAGGG
ACCAAGGTGGAAATCAAACGG (SEQ ID NO: 1241)
DMS0656 BMS3h-56-258-AST-DOM7h-11-3
GAGGTGCAGCTGTTGGAGTCTGGGGGAGGCTTGGTACAGCCTGGGGGGTCCCTGCGTCTC
TCCTGTGCAGCCTCCGGATTCACCTTTCGGGATTATGAGATGTGGTGGGTCCGCCAGGCT
CCAGGGAAGGGTCTAGAGCGGGTCTCAGCTATTAATCCGCAGGGTACGCGTACATACTAC
GCAGACTCCGTGAAGGGCCGGTTCACCATCTCCCGCGACAATTCCAAGAACACGCTGTAT
CTGCAAATGAACAGCCTGCGTGCCGAGGACACCGCGGTATATTACTGTGCGAAACTTCCG
TTTTACTTTCACGAGTGGGGTCAGGGAACCCTGGTCACCGTCTCGAGCGCTAGCACCGAC
ATCCAGATGACCCAGTCTCCATCCTCCCTGTCTGCATCTGTAGGAGACCGTGTCACCATC
ACTTGCCGGGCAAGTCGTCCGATTGGGACGACGTTAAGTTGGTACCAGCAGAAACCAGGG
AAAGCCCCTAAGCTCCTGATCCTTTGGAATTCCCGTTTGCAAAGTGGGGTCCCATCACGT
TTCAGTGGCAGTGGATCTGGGACAGATTTCACTCTCACCATCAGCAGTCTGCAACCTGAA
GATTTTGCTACGTACTACTGTGCGCAGGCTGGGACGCATCCTACGACGTTCGGCCAAGGG
ACCAAGGTGGAAATCAAACGG (SEQ ID NO: 1242)
DMS0657 BMS3h-56-258-AST-DOM7h-11-87
GAGGTGCAGCTGTTGGAGTCTGGGGGAGGCTTGGTACAGCCTGGGGGGTCCCTGCGTCTC
TCCTGTGCAGCCTCCGGATTCACCTTTCGGGATTATGAGATGTGGTGGGTCCGCCAGGCT
CCAGGGAAGGGTCTAGAGCGGGTCTCAGCTATTAATCCGCAGGGTACGCGTACATACTAC
GCAGACTCCGTGAAGGGCCGGTTCACCATCTCCCGCGACAATTCCAAGAACACGCTGTAT
CTGCAAATGAACAGCCTGCGTGCCGAGGACACCGCGGTATATTACTGTGCGAAACTTCCG
TTTTACTTTCACGAGTGGGGTCAGGGAACCCTGGTCACCGTCTCGAGCGCTAGCACCGAC
ATCCAGATGACCCAGTCTCCATCCTCCCTGTCTGCATCTGTAGGAGACCGTGTCACCATC
ACTTGCCGGGCAAGTCGTCCGATTGGGACGATGTTAAGTTGGTACCAGCAGAAACCAGGG
AAAGCCCCTAAGCTCCTGATCCTTGCTTTTTCCCGTTTGCAAAGTGGGGTCCCATCACGT
TTCAGTGGCAGTGGATCTGGGACAGATTTCACTCTCACCATCAGCAGTCTGCAACCTGAA
GATTTTGCTACGTACTACTGTGCGCAGGCTGGGACGCATCATACGACGTTCGGCCAAGGG
ACCAAGGTGGAAATCAAACGG (SEQ ID NO: 1243)
DMS0658 DOM7h-11-3-TVAAPS-BMS3h-56-201
GACATCCAGATGACCCAGTCTCCATCCTCCCTGTCTGCATCTGTAGGAGACCGTGTCACC
ATCACTTGCCGGGCAAGTCGTCCGATTGGGACGACGTTAAGTTGGTACCAGCAGAAACCA
GGGAAAGCCCCTAAGCTCCTGATCCTTTGGAATTCCCGTTTGCAAAGTGGGGTCCCATCA
CGTTTCAGTGGCAGTGGATCTGGGACAGATTTCACTCTCACCATCAGCAGTCTGCAACCT
GAAGATTTTGCTACGTACTACTGTGCGCAGGCTGGGACGCATCCTACGACGTTCGGCCAA
GGGACCAAGGTGGAAATCAAACGTACGGTGGCTGCACCATCTGAGGTGCAGCTGTTGGAG
TCTGGGGGAGGCTTGGTACAGCCTGGGGGGTCCCTGCGTCTCTCCTGTGCAGCCTCCGGA
TTCACCTTTCGGGATTATGAGATGTGGTGGGTCCGCCAGGCTCCAGGGAAGGGTCTAGAG
CGGGTCTCAGCTATTAATCCGCAGGGTACGCGTACATACTACGCAGACTCCGTGAAGGGC
CGGTTCACCATCTCCCGCGACAATTCCAAGAACACGCTGTATCTGCAAATGAACAGCCTG
CGTGCCGAGGACACCGCGGTATATTACTGTGCGAAACTTCCGTTTTACTTTCAGGAGTGG
GGTCAGGGAACCCTGGTCACCGTCTCCAGC (SEQ ID NO: 1244)
DMS0659 DOM7h-11-87-TVAAPS-BMS3h-56-201
GACATCCAGATGACCCAGTCTCCATCCTCCCTGTCTGCATCTGTAGGAGACCGTGTCACC
ATCACTTGCCGGGCAAGTCGTCCGATTGGGACGATGTTAAGTTGGTACCAGCAGAAACCA
GGGAAAGCCCCTAAGCTCCTGATCCTTGCTTTTTCCCGTTTGCAAAGTGGGGTCCCATCA
CGTTTCAGTGGCAGTGGATCTGGGACAGATTTCACTCTCACCATCAGCAGTCTGCAACCT
GAAGATTTTGCTACGTACTACTGTGCGCAGGCTGGGACGCATCATACGACGTTCGGCCAA
GGGACCAAGGTGGAAATCAAACGTACGGTGGCTGCACCATCTGAGGTGCAGCTGTTGGAG
TCTGGGGGAGGCTTGGTACAGCCTGGGGGGTCCCTGCGTCTCTCCTGTGCAGCCTCCGGA
TTCACCTTTCGGGATTATGAGATGTGGTGGGTCCGCCAGGCTCCAGGGAAGGGTCTAGAG
CGGGTCTCAGCTATTAATCCGCAGGGTACGCGTACATACTACGCAGACTCCGTGAAGGGC
CGGTTCACCATCTCCCGCGACAATTCCAAGAACACGCTGTATCTGCAAATGAACAGCCTG
CGTGCCGAGGACACCGCGGTATATTACTGTGCGAAACTTCCGTTTTACTTTCAGGAGTGG
GGTCAGGGAACCCTGGTCACCGTCTCCAGC (SEQ ID NO: 1245)
DMS0660 DOM7h-11-3-TVAAPS-BMS3h-56-258
GACATCCAGATGACCCAGTCTCCATCCTCCCTGTCTGCATCTGTAGGAGACCGTGTCACC
ATCACTTGCCGGGCAAGTCGTCCGATTGGGACGACGTTAAGTTGGTACCAGCAGAAACCA
GGGAAAGCCCCTAAGCTCCTGATCCTTTGGAATTCCCGTTTGCAAAGTGGGGTCCCATCA
CGTTTCAGTGGCAGTGGATCTGGGACAGATTTCACTCTCACCATCAGCAGTCTGCAACCT
GAAGATTTTGCTACGTACTACTGTGCGCAGGCTGGGACGCATCCTACGACGTTCGGCCAA
GGGACCAAGGTGGAAATCAAACGTACGGTGGCTGCACCATCTGAGGTGCAGCTGTTGGAG
TCTGGGGGAGGCTTGGTACAGCCTGGGGGGTCCCTGCGTCTCTCCTGTGCAGCCTCCGGA
TTCACCTTTCGGGATTATGAGATGTGGTGGGTCCGCCAGGCTCCAGGGAAGGGTCTAGAG
CGGGTCTCAGCTATTAATCCGCAGGGTACGCGTACATACTACGCAGACTCCGTGAAGGGC
CGGTTCACCATCTCCCGCGACAATTCCAAGAACACGCTGTATCTGCAAATGAACAGCCTG
CGTGCCGAGGACACCGCGGTATATTACTGTGCGAAACTTCCGTTTTACTTTCACGAGTGG
GGTCAGGGAACCCTGGTCACCGTCTCCAGC (SEQ ID NO: 1246)
DMS0661 DOM7h-11-87-TVAAPS-BMS3h-56-258
GACATCCAGATGACCCAGTCTCCATCCTCCCTGTCTGCATCTGTAGGAGACCGTGTCACC
ATCACTTGCCGGGCAAGTCGTCCGATTGGGACGATGTTAAGTTGGTACCAGCAGAAACCA
GGGAAAGCCCCTAAGCTCCTGATCCTTGCTTTTTCCCGTTTGCAAAGTGGGGTCCCATCA
CGTTTCAGTGGCAGTGGATCTGGGACAGATTTCACTCTCACCATCAGCAGTCTGCAACCT
GAAGATTTTGCTACGTACTACTGTGCGCAGGCTGGGACGCATCATACGACGTTCGGCCAA
GGGACCAAGGTGGAAATCAAACGTACGGTGGCTGCACCATCTGAGGTGCAGCTGTTGGAG
TCTGGGGGAGGCTTGGTACAGCCTGGGGGGTCCCTGCGTCTCTCCTGTGCAGCCTCCGGA
TTCACCTTTCGGGATTATGAGATGTGGTGGGTCCGCCAGGCTCCAGGGAAGGGTCTAGAG
CGGGTCTCAGCTATTAATCCGCAGGGTACGCGTACATACTACGCAGACTCCGTGAAGGGC
CGGTTCACCATCTCCCGCGACAATTCCAAGAACACGCTGTATCTGCAAATGAACAGCCTG
CGTGCCGAGGACACCGCGGTATATTACTGTGCGAAACTTCCGTTTTACTTTCACGAGTGG
GGTCAGGGAACCCTGGTCACCGTCTCCAGC (SEQ ID NO: 1247)
DMS0662 DOM7h-11-90-TVAAPS-BMS3h-56-201
GACATCCAGATGACCCAGTCTCCATCCTCCCTGTCTGCATCTGTAGGAGACCGTGTCACC
ATCACTTGCCGGGCAAGTCGTCCGATTGGGACGATGTTAAGTTGGTACCAGCAGAAACCA
GGGAAAGCCCCTAAGCTCCTGATCCTTGCTTTTTCCCGTTTGCAAAGTGGGGTCCCATCA
CGTTTCAGTGGCAGTGGATCTGGGACAGATTTCACTCTCACCATCAGCAATCTGCAACCT
GAAGATTTTGCTACGTACTACTGCGCGCAGGCTGGGACGCATCCTACGACGTTCGGCCAA
GGGACCAAGGTGGAAATCAAACGTACGGTGGCTGCACCATCTGAGGTGCAGCTGTTGGAG
TCCGGGGGAGGCTTGGTACAGCCTGGGGGGTCCCTGCGTCTCTCCTGTGCAGCCTCCGGA
TTCACCTTTCGGGATTATGAGATGTGGTGGGTCCGCCAGGCTCCAGGGAAGGGTCTAGAG
CGGGTCTCAGCTATTAATCCGCAGGGTACGCGTACATACTACGCAGACTCCGTGAAGGGC
CGGTTCACCATCTCCCGCGACAATTCCAAGAACACGCTGTATCTGCAAATGAACAGCCTG
CGTGCCGAGGACACCGCGGTATATTACTGTGCGAAACTTCCGTTTTACTTTCAGGAGTGG
GGTCAGGGAACCCTGGTCACCGTCTCCAGC (SEQ ID NO: 1248)
DMS0663 DOM7h-11-86-TVAAPS-BMS3h-56-201
GACATCCAGATGACCCAGTCTCCATCCTCCCTGTCTGCATCTGTAGGAGACCGTGTCACC
ATCACTTGCCGGGCAAGTCGTCCGATTGGGACGATGTTAAGTTGGTACCAGCAGAAACCA
GGGAAAGCCCCTAAGCTCCTGATCCTTGCTTTTTCCCGTTTGCAAAGTGGGGTCCCATCA
CGTTTCAGTGGCAGTGGATCTGGGACAGATTTCACTCTCACCATCAGCAGTCTGCAACCT
GAAGATGTTGCTACGTACTACTGTGCGCAGGCTGGGACGCATCCTACGACGTTCGGCCAA
GGGACCAAGGTGGAAATCAAACGTACGGTGGCTGCACCATCTGAGGTGCAGCTGTTGGAG
TCTGGGGGAGGCTTGGTACAGCCTGGGGGGTCCCTGCGTCTCTCCTGTGCAGCCTCCGGA
TTCACCTTTCGGGATTATGAGATGTGGTGGGTCCGCCAGGCTCCAGGGAAGGGTCTAGAG
CGGGTCTCAGCTATTAATCCGCAGGGTACGCGTACATACTACGCAGACTCCGTGAAGGGC
CGGTTCACCATCTCCCGCGACAATTCCAAGAACACGCTGTATCTGCAAATGAACAGCCTG
CGTGCCGAGGACACCGCGGTATATTACTGTGCGAAACTTCCGTTTTACTTTCAGGAGTGG
GGTCAGGGAACCCTGGTCACCGTCTCCAGC (SEQ ID NO: 1249)
DMS0664 DOM7h-11-69-TVAAPS-BMS3h-56-201
GACATCCAGATGACCCAGTCTCCATCCTCCCTGTCTGCATCTGTAGGAGACCGTGTCACC
ATCACTTGCCGGGCAAGTCGTCCGATTGGGACGATGTTAAGTTGGTACCAGCAGAAACCA
GGGAAAGCCCCTAAGCTCCTGATCCTTGCTTTTTCCCGTTTGCAAAGTGGGGTCCCATCA
CGTTTCAGTGGCAGTGGATCTGGGACAGATTTCACTCTCACCATCAGCAGTCTGCAACCT
GAAGATTTTGCTACGTACTACTGTGCGCAGGCTGGGGTGCATCCTACGACGTTCGGCCAA
GGGACCAAGGTGGAAATCAAACGTACGGTGGCTGCACCATCTGAGGTGCAGCTGTTGGAG
TCTGGGGGAGGCTTGGTACAGCCTGGGGGGTCCCTGCGTCTCTCCTGTGCAGCCTCCGGA
TTCACCTTTCGGGATTATGAGATGTGGTGGGTCCGCCAGGCTCCAGGGAAGGGTCTAGAG
CGGGTCTCAGCTATTAATCCGCAGGGTACGCGTACATACTACGCAGACTCCGTGAAGGGC
CGGTTCACCATCTCCCGCGACAATTCCAAGAACACGCTGTATCTGCAAATGAACAGCCTG
CGTGCCGAGGACACCGCGGTATATTACTGTGCGAAACTTCCGTTTTACTTTCAGGAGTGG
GGTCAGGGAACCCTGGTCACCGTCTCCAGC (SEQ ID NO: 1250)
DMS0667 DOM7h-11-3-TVAAPS-BMS3h-38-240
GACATCCAGATGACCCAGTCTCCATCCTCCCTGTCTGCATCTGTAGGAGACCGTGTCACC
ATCACTTGCCGGGCAAGTCGTCCGATTGGGACGACGTTAAGTTGGTACCAGCAGAAACCA
GGGAAAGCCCCTAAGCTCCTGATCCTTTGGAATTCCCGTTTGCAAAGTGGGGTCCCATCA
CGTTTCAGTGGCAGTGGATCTGGGACAGATTTCACTCTCACCATCAGCAGTCTGCAACCT
GAAGATTTTGCTACGTACTACTGTGCGCAGGCTGGGACGCATCCTACGACGTTCGGCCAA
GGGACCAAGGTGGAAATCAAACGTACGGTGGCTGCACCATCTGAGGTGCAGCTGTTGGAG
TCTGGGGGAGGCTTGGTACAGCCTGGGGGGTCCCTGCGTCTCTCCTGCGCAGCCTCCGGA
TTCACCTTTGAGGAGGAGGAGATGATTTGGGTCCGCCAGGCTCCAGGGAAGGGTCTAGAG
TGGGTCTCAGCTATTAGTAGGAACGGTTACAGCACATACTACGCAGACTCCGTGAAGGGC
CGGTTCACCATCTCCCGCGACAATTCCAAGAACACGCTGTATCTGCAAATGAACAGCCTG
CGTGCCGAGGATACCGCGGTATATTACTGTGGGAAAGAGCCGTTTCGTTATGACTACTGG
GGTCAGGGAACCCTGGTCACCGTCTCCAGC (SEQ ID NO: 1251)
DMS0668 BMS3h-38-240-AST-DOM7h-11-3
GAGGTGCAGCTGTTGGAGTCTGGGGGAGGCTTGGTACAGCCTGGGGGGTCCCTGCGTCTC
TCCTGCGCAGCCTCCGGATTCACCTTTGAGGAGGAGGAGATGATTTGGGTCCGCCAGGCT
CCAGGGAAGGGTCTAGAGTGGGTCTCAGCTATTAGTAGGAACGGTTACAGCACATACTAC
GCAGACTCCGTGAAGGGCCGGTTCACCATCTCCCGCGACAATTCCAAGAACACGCTGTAT
CTGCAAATGAACAGCCTGCGTGCCGAGGATACCGCGGTATATTACTGTGGGAAAGAGCCG
TTTCGTTATGACTACTGGGGTCAGGGAACCCTGGTCACCGTCTCGAGCGCTAGCACCGAC
ATCCAGATGACCCAGTCTCCATCCTCCCTGTCTGCATCTGTAGGAGACCGTGTCACCATC
ACTTGCCGGGCAAGTCGTCCGATTGGGACGACGTTAAGTTGGTACCAGCAGAAACCAGGG
AAAGCCCCTAAGCTCCTGATCCTTTGGAATTCCCGTTTGCAAAGTGGGGTCCCATCACGT
TTCAGTGGCAGTGGATCTGGGACAGATTTCACTCTCACCATCAGCAGTCTGCAACCTGAA
GATTTTGCTACGTACTACTGTGCGCAGGCTGGGACGCATCCTACGACGTTCGGCCAAGGG
ACCAAGGTGGAAATCAAACGG (SEQ ID NO: 1252)
DMS0669 DOM7h-14-10-TVAAPS-BMS3h-38-240
GACATCCAGATGACCCAGTCTCCATCCTCCCTGTCTGCATCTGTAGGAGACCGTGTCACC
ATCACTTGCCGGGCAAGTCAGTGGATTGGGTCTCAGTTATCTTGGTACCAGCAGAAACCA
GGGAAAGCCCCTAAGCTCCTGATCATGTGGCGTTCCTCGTTGCAAAGTGGGGTCCCATCA
CGTTTCAGTGGCAGTGGATCTGGGACAGATTTCACTCTCACCATCAGCAGTCTGCAACCT
GAAGATTTTGCTACGTACTACTGTGCTCAGGGTTTGAGGCATCCTAAGACGTTCGGCCAA
GGGACCAAGGTGGAAATCAAACGTACGGTGGCTGCACCATCTGAGGTGCAGCTGTTGGAG
TCTGGGGGAGGCTTGGTACAGCCTGGGGGGTCCCTGCGTCTCTCCTGCGCAGCCTCCGGA
TTCACCTTTGAGGAGGAGGAGATGATTTGGGTCCGCCAGGCTCCAGGGAAGGGTCTAGAG
TGGGTCTCAGCTATTAGTAGGAACGGTTACAGCACATACTACGCAGACTCCGTGAAGGGC
CGGTTCACCATCTCCCGCGACAATTCCAAGAACACGCTGTATCTGCAAATGAACAGCCTG
CGTGCCGAGGATACCGCGGTATATTACTGTGGGAAAGAGCCGTTTCGTTATGACTACTGG
GGTCAGGGAACCCTGGTCACCGTCTCCAGC (SEQ ID NO: 1253)
DMS0670 BMS3h-38-240-AST-DOM7h-14-10
GAGGTGCAGCTGTTGGAGTCTGGGGGAGGCTTGGTACAGCCTGGGGGGTCCCTGCGTCTC
TCCTGCGCAGCCTCCGGATTCACCTTTGAGGAGGAGGAGATGATTTGGGTCCGCCAGGCT
CCAGGGAAGGGTCTAGAGTGGGTCTCAGCTATTAGTAGGAACGGTTACAGCACATACTAC
GCAGACTCCGTGAAGGGCCGGTTCACCATCTCCCGCGACAATTCCAAGAACACGCTGTAT
CTGCAAATGAACAGCCTGCGTGCCGAGGATACCGCGGTATATTACTGTGGGAAAGAGCCG
TTTCGTTATGACTACTGGGGTCAGGGAACCCTGGTCACCGTCTCGAGCGCTAGCACCGAC
ATCCAGATGACCCAGTCTCCATCCTCCCTGTCTGCATCTGTAGGAGACCGTGTCACCATC
ACTTGCCGGGCAAGTCAGTGGATTGGGTCTCAGTTATCTTGGTACCAGCAGAAACCAGGG
AAAGCCCCTAAGCTCCTGATCATGTGGCGTTCCTCGTTGCAAAGTGGGGTCCCATCACGT
TTCAGTGGCAGTGGATCTGGGACAGATTTCACTCTCACCATCAGCAGTCTGCAACCTGAA
GATTTTGCTACGTACTACTGTGCTCAGGGTTTGAGGCATCCTAAGACGTTCGGCCAAGGG
ACCAAGGTGGAAATCAAACGG (SEQ ID NO: 1254)
DMS0671 BMS3h-38-235-AST-DOM7h-11-3
GAGGTGCAGCTGTTGGCGTCTGGGGGAGGCTTGGTACAGCCTGGGGGGTCCCTGCGTCTC
TCCTGCGCAGCCTCCGGATTCACCTTTGAGGAGGAGGAGATGATTTGGGTCCGCCAGGCT
CCAGGGAAGGGTCTAGAGTGGGTCTCAGCTATTAGTAGGAACGGTTACAGCACATACTAC
GCAGACTCCGTGAAGGGCCGGTTCACCATCTCCCGCGACAATTCCAAGAACACGCTGTAT
CTGCAAATGAACAGCCTGCGTGCCGAGGATACCGCGGTATATTACTGTGGGAAAGAGCCG
TTTCGTTATGACTACTGGGGTCAGGGAACCCTGGTCACCGTCTCGAGCGCTTCAACCGAC
ATCCAGATGACCCAGTCTCCATCCTCCCTGTCTGCATCTGTAGGAGACCGTGTCACCATC
ACTTGCCGGGCAAGTCGTCCGATTGGGACGACGTTAAGTTGGTACCAGCAGAAACCAGGG
AAAGCCCCTAAGCTCCTGATCCTTTGGAATTCCCGTTTGCAAAGTGGGGTCCCATCACGT
TTCAGTGGCAGTGGATCTGGGACAGATTTCACTCTCACCATCAGCAGTCTGCAACCTGAA
GATTTTGCTACGTACTACTGTGCGCAGGCTGGGACGCATCCTACGACGTTCGGCCAAGGG
ACCAAGGTGGAAATCAAACGG (SEQ ID NO: 1255)
DMS0672 BMS3h-38-235-AST-DOM7h-11-90
GAGGTGCAGCTGTTGGCGTCTGGGGGAGGCTTGGTACAGCCTGGGGGGTCCCTGCGTCTC
TCCTGCGCAGCCTCCGGATTCACCTTTGAGGAGGAGGAGATGATTTGGGTCCGCCAGGCC
CCAGGGAAGGGTCTAGAGTGGGTCTCAGCTATTAGTAGGAACGGTTACAGCACATACTAC
GCAGACTCCGTGAAGGGCCGGTTCACCATCTCCCGCGACAATTCCAAGAACACGCTGTAT
CTGCAAATGAACAGCCTGCGTGCCGAGGATACCGCGGTATATTACTGTGGGAAAGAGCCG
TTTCGTTATGACTACTGGGGTCAGGGAACCCTGGTCACCGTCTCGAGCGCTTCAACCGAC
ATCCAGATGACCCAGTCTCCATCCTCCCTGTCTGCATCTGTAGGAGACCGTGTCACCATC
ACTTGCCGGGCAAGTCGTCCGATTGGGACGATGTTAAGTTGGTACCAGCAGAAACCAGGG
AAAGCCCCTAAGCTCCTGATCCTTGCTTTTTCCCGTTTGCAAAGTGGGGTCCCATCACGT
TTCAGTGGCAGTGGATCTGGGACAGATTTCACTCTCACCATCAGCAATCTGCAACCTGAA
GATTTTGCTACGTACTACTGCGCGCAGGCTGGGACGCATCCTACGACGTTCGGCCAAGGG
ACCAAGGTGGAAATCAAACGG (SEQ ID NO: 1256)
DMS0674 DOM7h-11-3-TVAAPS-BMS3h-38-235
GACATCCAGATGACCCAGTCTCCATCCTCCCTGTCTGCATCTGTAGGAGACCGTGTCACC
ATCACTTGCCGGGCAAGTCGTCCGATTGGGACGACGTTAAGTTGGTACCAGCAGAAACCA
GGGAAAGCCCCTAAGCTCCTGATCCTTTGGAATTCCCGTTTGCAAAGTGGGGTCCCATCA
CGTTTCAGTGGCAGTGGATCTGGGACAGATTTCACTCTCACCATCAGCAGTCTGCAACCT
GAAGATTTTGCTACGTACTACTGTGCGCAGGCTGGGACGCATCCTACGACGTTCGGCCAA
GGGACCAAGGTGGAAATCAAACGGACCGTGGCGGCGCCGAGTGAGGTGCAGCTGTTGGCG
TCTGGGGGAGGCTTGGTACAGCCTGGGGGGTCCCTGCGTCTCTCCTGCGCAGCCTCCGGA
TTCACCTTTGAGGAGGAGGAGATGATTTGGGTCCGCCAGGCTCCAGGGAAGGGTCTAGAG
TGGGTCTCAGCTATTAGTAGGAACGGTTACAGCACATACTACGCAGACTCCGTGAAGGGC
CGGTTCACCATCTCCCGCGACAATTCCAAGAACACGCTGTATCTGCAAATGAACAGCCTG
CGTGCCGAGGATACCGCGGTATATTACTGTGGGAAAGAGCCGTTTCGTTATGACTACTGG
GGTCAGGGAACCCTGGTCACCGTCTCCAGC (SEQ ID NO: 1257)
DMS0675 DOM7h-11-90-TVAAPS-BMS3h-38-235
GACATCCAGATGACCCAGTCTCCATCCTCCCTGTCTGCATCTGTAGGAGACCGTGTCACC
ATCACTTGCCGGGCAAGTCGTCCGATTGGGACGATGTTAAGTTGGTACCAGCAGAAACCA
GGGAAAGCCCCTAAGCTCCTGATCCTTGCTTTTTCCCGTTTGCAAAGTGGGGTCCCATCA
CGTTTCAGTGGCAGTGGATCTGGGACAGATTTCACTCTCACCATCAGCAATCTGCAACCT
GAAGATTTTGCTACGTACTACTGCGCGCAGGCTGGGACGCATCCTACGACGTTCGGCCAA
GGGACCAAGGTGGAAATCAAACGGACCGTGGCGGCGCCGAGTGAGGTGCAACTGTTGGCG
TCTGGGGGAGGCTTGGTACAGCCTGGGGGGTCCCTGCGTCTCTCCTGCGCAGCCTCCGGA
TTCACCTTTGAGGAGGAGGAGATGATTTGGGTCCGCCAGGCTCCAGGGAAGGGTCTAGAG
TGGGTCTCAGCTATTAGTAGGAACGGTTACAGCACATACTACGCAGACTCCGTGAAGGGC
CGGTTCACCATCTCCCGCGACAATTCCAAGAACACGCTGTATCTGCAAATGAACAGCCTG
CGTGCCGAGGATACCGCGGTATATTACTGTGGGAAAGAGCCGTTTCGTTATGACTACTGG
GGTCAGGGAACCCTGGTCACCGTCTCCAGC (SEQ ID NO: 1258)
DMS0677 DOM7h-11-90-TVA-BMS3h-56-258
GACATCCAGATGACCCAGTCTCCATCCTCCCTGTCTGCATCTGTAGGAGACCGTGTCACC
ATCACTTGCCGGGCAAGTCGTCCGATTGGGACGATGTTAAGTTGGTACCAGCAGAAACCA
GGGAAAGCCCCTAAGCTCCTGATCCTTGCTTTTTCCCGTTTGCAAAGTGGGGTCCCATCA
CGTTTCAGTGGCAGTGGATCTGGGACAGATTTCACTCTCACCATCAGCAATCTGCAACCT
GAAGATTTTGCTACGTACTACTGCGCGCAGGCTGGGACGCATCCTACGACGTTCGGCCAA
GGGACCAAGGTGGAAATCAAACGTACGGTGGCGGAGGTGCAGCTGTTGGAGTCTGGGGGA
GGCTTGGTACAGCCTGGGGGGTCCCTGCGTCTCTCCTGTGCAGCCTCCGGATTCACCTTT
CGGGATTATGAGATGTGGTGGGTCCGCCAGGCTCCAGGGAAGGGTCTAGAGCGGGTCTCA
GCTATTAATCCGCAGGGTACGCGTACATACTACGCAGACTCCGTGAAGGGCCGGTTCACC
ATCTCCCGCGACAATTCCAAGAACACGCTGTATCTGCAAATGAACAGCCTGCGTGCCGAG
GACACCGCGGTATATTACTGTGCGAAACTTCCGTTTTACTTTCACGAGTGGGGTCAGGGA
ACCCTGGTCACCGTCTCCAGC (SEQ ID NO: 1259)
DMS0678 DOM7h-11-90-ASTSGPS-BMS3h-56-258
GACATCCAGATGACCCAGTCTCCATCCTCCCTGTCTGCATCTGTAGGAGACCGTGTCACC
ATCACTTGCCGGGCAAGTCGTCCGATTGGGACGATGTTAAGTTGGTACCAGCAGAAACCA
GGGAAAGCCCCTAAGCTCCTGATCCTTGCTTTTTCCCGTTTGCAAAGTGGGGTCCCATCA
CGTTTCAGTGGCAGTGGATCTGGGACAGATTTCACTCTCACCATCAGCAATCTGCAACCT
GAAGATTTTGCTACGTACTACTGCGCGCAGGCTGGGACGCATCCTACGACGTTCGGCCAA
GGGACCAAGGTGGAAATCAAACGGGCTAGCACCTCAGGTCCATCGGAGGTGCAGCTGTTG
GAGTCTGGGGGAGGCTTGGTACAGCCTGGGGGGTCCCTGCGTCTCTCCTGTGCAGCCTCC
GGATTCACCTTTCGGGATTATGAGATGTGGTGGGTCCGCCAGGCTCCAGGGAAGGGTCTA
GAGCGGGTCTCAGCTATTAATCCGCAGGGTACGCGTACATACTACGCAGACTCCGTGAAG
GGCCGGTTCACCATCTCCCGCGACAATTCCAAGAACACGCTGTATCTGCAAATGAACAGC
CTGCGTGCCGAGGACACCGCGGTATATTACTGTGCGAAACTTCCGTTTTACTTTCACGAG
TGGGGTCAGGGAACCCTGGTCACCGTCTCCAGC (SEQ ID NO: 1260)
DMS0679 DOM7h-11-90-G4S-BMS3h-56-258
GACATCCAGATGACCCAGTCTCCATCCTCCCTGTCTGCATCTGTAGGAGACCGTGTCACC
ATCACTTGCCGGGCAAGTCGTCCGATTGGGACGATGTTAAGTTGGTACCAGCAGAAACCA
GGGAAAGCCCCTAAGCTCCTGATCCTTGCTTTTTCCCGTTTGCAAAGTGGGGTCCCATCA
CGTTTCAGTGGCAGTGGATCTGGGACAGATTTCACTCTCACCATCAGCAATCTGCAACCT
GAAGATTTTGCTACGTACTACTGCGCGCAGGCTGGGACGCATCCTACGACGTTCGGCCAA
GGGACCAAGGTGGAAATCAAACGGGGTGGAGGTGGCTCTGAGGTGCAGCTGTTGGAGTCT
GGGGGAGGCTTGGTACAGCCTGGGGGGTCCCTGCGTCTCTCCTGTGCAGCCTCCGGATTC
ACCTTTCGGGATTATGAGATGTGGTGGGTCCGCCAGGCTCCAGGGAAGGGTCTAGAGCGG
GTCTCAGCTATTAATCCGCAGGGTACGCGTACATACTACGCAGACTCCGTGAAGGGCCGG
TTCACCATCTCCCGCGACAATTCCAAGAACACGCTGTATCTGCAAATGAACAGCCTGCGT
GCCGAGGACACCGCGGTATATTACTGTGCGAAACTTCCGTTTTACTTTCACGAGTGGGGT
CAGGGAACCCTGGTCACCGTCTCCAGC (SEQ ID NO: 1261)
DMS0680 DOM7h-11-90-(G4S)3-BMS3h-56-258
GACATCCAGATGACCCAGTCTCCATCCTCCCTGTCTGCATCTGTAGGAGACCGTGTCACC
ATCACTTGCCGGGCAAGTCGTCCGATTGGGACGATGTTAAGTTGGTACCAGCAGAAACCA
GGGAAAGCCCCTAAGCTCCTGATCCTTGCTTTTTCCCGTTTGCAAAGTGGGGTCCCATCA
CGTTTCAGTGGCAGTGGATCTGGGACAGATTTCACTCTCACCATCAGCAATCTGCAACCT
GAAGATTTTGCTACGTACTACTGCGCGCAGGCTGGGACGCATCCTACGACGTTCGGCCAA
GGGACCAAGGTGGAAATCAAACGGGGTGGAGGTGGCTCTGGAGGTGGCGGTAGCGGCGGA
GGCGGTTCAGAGGTGCAGCTGTTGGAGTCTGGGGGAGGCTTGGTACAGCCTGGGGGGTCC
CTGCGTCTCTCCTGTGCAGCCTCCGGATTCACCTTTCGGGATTATGAGATGTGGTGGGTC
CGCCAGGCTCCAGGGAAGGGTCTAGAGCGGGTCTCAGCTATTAATCCGCAGGGTACGCGT
ACATACTACGCAGACTCCGTGAAGGGCCGGTTCACCATCTCCCGCGACAATTCCAAGAAC
ACGCTGTATCTGCAAATGAACAGCCTGCGTGCCGAGGACACCGCGGTATATTACTGTGCG
AAACTTCCGTTTTACTTTCACGAGTGGGGTCAGGGAACCCTGGTCACCGTCTCCAGC (SEQ ID
NO: 1262)
DMS0681 DOM7h-11-90-(G4S)5-BMS3h-56-258
GACATCCAGATGACCCAGTCTCCATCCTCCCTGTCTGCATCTGTAGGAGACCGTGTCACC
ATCACTTGCCGGGCAAGTCGTCCGATTGGGACGATGTTAAGTTGGTACCAGCAGAAACCA
GGGAAAGCCCCTAAGCTCCTGATCCTTGCTTTTTCCCGTTTGCAAAGTGGGGTCCCATCA
CGTTTCAGTGGCAGTGGATCTGGGACAGATTTCACTCTCACCATCAGCAATCTGCAACCT
GAAGATTTTGCTACGTACTACTGCGCGCAGGCTGGGACGCATCCTACGACGTTCGGCCAA
GGGACCAAGGTGGAAATCAAACGGGGTGGAGGTGGCTCTGGAGGTGGCGGTAGCGGCGGT
GGCGGTTCAGGTGGCGGAGGTTCTGGAGGCGGTGGATCTGAGGTGCAGCTGTTGGAGTCT
GGGGGAGGCTTGGTACAGCCTGGGGGGTCCCTGCGTCTCTCCTGTGCAGCCTCCGGATTC
ACCTTTCGGGATTATGAGATGTGGTGGGTCCGCCAGGCTCCAGGGAAGGGTCTAGAGCGG
GTCTCAGCTATTAATCCGCAGGGTACGCGTACATACTACGCAGACTCCGTGAAGGGCCGG
TTCACCATCTCCCGCGACAATTCCAAGAACACGCTGTATCTGCAAATGAACAGCCTGCGT
GCCGAGGACACCGCGGTATATTACTGTGCGAAACTTCCGTTTTACTTTCACGAGTGGGGT
CAGGGAACCCTGGTCACCGTCTCCAGC (SEQ ID NO: 1263)
DMS0682 BMS3h-56-258-TVA-DOM7h-11-90
GAGGTGCAGCTGTTGGAGTCTGGGGGAGGCTTGGTACAGCCTGGGGGGTCCCTGCGTCTC
TCCTGTGCAGCCTCCGGATTCACCTTTCGGGATTATGAGATGTGGTGGGTCCGCCAGGCT
CCAGGGAAGGGTCTAGAGCGGGTCTCAGCTATTAATCCGCAGGGTACGCGTACATACTAC
GCAGACTCCGTGAAGGGCCGGTTCACCATCTCCCGCGACAATTCCAAGAACACGCTGTAT
CTGCAAATGAACAGCCTGCGTGCCGAGGACACCGCGGTATATTACTGTGCGAAACTTCCG
TTTTACTTTCACGAGTGGGGTCAGGGAACCCTGGTCACCGTTTCGAGCACGGTGGCGGAC
ATCCAGATGACCCAGTCTCCATCCTCCCTGTCTGCATCTGTAGGAGACCGTGTCACCATC
ACTTGCCGGGCAAGTCGTCCGATTGGGACGATGTTAAGTTGGTACCAGCAGAAACCAGGG
AAAGCCCCTAAGCTCCTGATCCTTGCTTTTTCCCGTTTGCAAAGTGGGGTCCCATCACGT
TTCAGTGGCAGTGGATCTGGGACAGATTTCACTCTCACCATCAGCAATCTGCAACCTGAA
GATTTTGCTACGTACTACTGCGCGCAGGCTGGGACGCATCCTACGACGTTCGGCCAAGGG
ACCAAGGTGGAAATCAAACGG (SEQ ID NO: 1264)
DMS0683 BMS3h-56-258-ASTSGPS-DOM7h-11-90
GAGGTGCAGCTGTTGGAGTCTGGGGGAGGCTTGGTACAGCCTGGGGGGTCCCTGCGTCTC
TCCTGTGCAGCCTCCGGATTCACCTTTCGGGATTATGAGATGTGGTGGGTCCGCCAGGCT
CCAGGGAAGGGTCTAGAGCGGGTCTCAGCTATTAATCCGCAGGGTACGCGTACATACTAC
GCAGACTCCGTGAAGGGCCGGTTCACCATCTCCCGCGACAATTCCAAGAACACGCTGTAT
CTGCAAATGAACAGCCTGCGTGCCGAGGACACCGCGGTATATTACTGTGCGAAACTTCCG
TTTTACTTTCACGAGTGGGGTCAGGGAACCCTGGTCACCGTCTCGAGCGCTAGCACCTCA
GGTCCATCGGACATCCAGATGACCCAGTCTCCATCCTCCCTGTCTGCATCTGTAGGAGAC
CGTGTCACCATCACTTGCCGGGCAAGTCGTCCGATTGGGACGATGTTAAGTTGGTACCAG
CAGAAACCAGGGAAAGCCCCTAAGCTCCTGATCCTTGCTTTTTCCCGTTTGCAAAGTGGG
GTCCCATCACGTTTCAGTGGCAGTGGATCTGGGACAGATTTCACTCTCACCATCAGCAAT
CTGCAACCTGAAGATTTTGCTACGTACTACTGCGCGCAGGCTGGGACGCATCCTACGACG
TTCGGCCAAGGGACCAAGGTGGAAATCAAACGG (SEQ ID NO: 1265)
DMS0684 BMS3h-56-258-G4S-DOM7h-11-90
GAGGTGCAGCTGTTGGAGTCTGGGGGAGGCTTGGTACAGCCTGGGGGGTCCCTGCGTCTC
TCCTGTGCAGCCTCCGGATTCACCTTTCGGGATTATGAGATGTGGTGGGTCCGCCAGGCT
CCAGGGAAGGGTCTAGAGCGGGTCTCAGCTATTAATCCGCAGGGTACGCGTACATACTAC
GCAGACTCCGTGAAGGGCCGGTTCACCATCTCCCGCGACAATTCCAAGAACACGCTGTAT
CTGCAAATGAACAGCCTGCGTGCCGAGGACACCGCGGTATATTACTGTGCGAAACTTCCG
TTTTACTTTCACGAGTGGGGTCAGGGAACCCTGGTCACCGTCTCGAGCGGTGGAGGCGGC
TCTGACATCCAGATGACCCAGTCTCCATCCTCCCTGTCTGCATCTGTAGGAGACCGTGTC
ACCATCACTTGCCGGGCAAGTCGTCCGATTGGGACGATGTTAAGTTGGTACCAGCAGAAA
CCAGGGAAAGCCCCTAAGCTCCTGATCCTTGCTTTTTCCCGTTTGCAAAGTGGGGTCCCA
TCACGTTTCAGTGGCAGTGGATCTGGGACAGATTTCACTCTCACCATCAGCAATCTGCAA
CCTGAAGATTTTGCTACGTACTACTGCGCGCAGGCTGGGACGCATCCTACGACGTTCGGC
CAAGGGACCAAGGTGGAAATCAAACGG (SEQ ID NO: 1266)
DMS0685 BMS3h-56-258-(G4S)3-DOM7h-11-90
GAGGTGCAGCTGTTGGAGTCTGGGGGAGGCTTGGTACAGCCTGGGGGGTCCCTGCGTCTC
TCCTGTGCAGCCTCCGGATTCACCTTTCGGGATTATGAGATGTGGTGGGTCCGCCAGGCT
CCAGGGAAGGGTCTAGAGCGGGTCTCAGCTATTAATCCGCAGGGTACGCGTACATACTAC
GCAGACTCCGTGAAGGGCCGGTTCACCATCTCCCGCGACAATTCCAAGAACACGCTGTAT
CTGCAAATGAACAGCCTGCGTGCCGAGGACACCGCGGTATATTACTGTGCGAAACTTCCG
TTTTACTTTCACGAGTGGGGTCAGGGAACCCTGGTCACCGTCTCGAGCGGTGGAGGTGGC
TCTGGAGGTGGCGGTAGCGGCGGTGGCGGTTCAGACATCCAGATGACCCAGTCTCCATCC
TCCCTGTCTGCATCTGTAGGAGACCGTGTCACCATCACTTGCCGGGCAAGTCGTCCGATT
GGGACGATGTTAAGTTGGTACCAGCAGAAACCAGGGAAAGCCCCTAAGCTCCTGATCCTT
GCTTTTTCCCGTTTGCAAAGTGGGGTCCCATCACGTTTCAGTGGCAGTGGATCTGGGACA
GATTTCACTCTCACCATCAGCAATCTGCAACCTGAAGATTTTGCTACGTACTACTGCGCG
CAGGCTGGGACGCATCCTACGACGTTCGGCCAAGGGACCAAGGTGGAAATCAAACGG (SEQ ID
NO: 1267)
DMS0686 BMS3h-56-258-(G4S)5-DOM7h-11-90
GAGGTGCAGCTGTTGGAGTCTGGGGGAGGCTTGGTACAGCCTGGGGGGTCCCTGCGTCTC
TCCTGTGCAGCCTCCGGATTCACCTTTCGGGATTATGAGATGTGGTGGGTCCGCCAGGCT
CCAGGGAAGGGTCTAGAGCGGGTCTCAGCTATTAATCCGCAGGGTACGCGTACATACTAC
GCAGACTCCGTGAAGGGCCGGTTCACCATCTCCCGCGACAATTCCAAGAACACGCTGTAT
CTGCAAATGAACAGCCTGCGTGCCGAGGACACCGCGGTATATTACTGTGCGAAACTTCCG
TTTTACTTTCACGAGTGGGGTCAGGGAACCCTGGTCACCGTCTCGAGCGGTGGAGGTGGC
TCTGGAGGTGGCGGTAGCGGCGGTGGCGGTTCAGGTGGCGGAGGTTCTGGAGGCGGTGGA
TCTGACATCCAGATGACCCAGTCTCCATCCTCCCTGTCTGCATCTGTAGGAGACCGTGTC
ACCATCACTTGCCGGGCAAGTCGTCCGATTGGGACGATGTTAAGTTGGTACCAGCAGAAA
CCAGGGAAAGCCCCTAAGCTCCTGATCCTTGCTTTTTCCCGTTTGCAAAGTGGGGTCCCA
TCACGTTTCAGTGGCAGTGGATCTGGGACAGATTTCACTCTCACCATCAGCAATCTGCAA
CCTGAAGATTTTGCTACGTACTACTGCGCGCAGGCTGGGACGCATCCTACGACGTTCGGC
CAAGGGACCAAGGTGGAAATCAAACGG (SEQ ID NO: 1268)
DMS0688 DOM7h-11-90-TVAAPS-BMS3h-56-258
GACATCCAGATGACCCAGTCTCCATCCTCCCTGTCTGCATCTGTAGGAGACCGTGTCACC
ATCACTTGCCGGGCAAGTCGTCCGATTGGGACGATGTTAAGTTGGTACCAGCAGAAACCA
GGGAAAGCCCCTAAGCTCCTGATCCTTGCTTTTTCCCGTTTGCAAAGTGGGGTCCCATCA
CGTTTCAGTGGCAGTGGATCTGGGACAGATTTCACTCTCACCATCAGCAATCTGCAACCT
GAAGATTTTGCTACGTACTACTGCGCGCAGGCTGGGACGCATCCTACGACGTTCGGCCAA
GGGACCAAGGTGGAAATCAAACGGACCGTAGCGGCGCCGAGTGAGGTGCAGCTGTTGGAG
TCTGGGGGAGGCTTGGTACAGCCTGGGGGGTCCCTGCGTCTCTCCTGTGCAGCCTCCGGA
TTCACCTTTCGGGATTATGAGATGTGGTGGGTCCGCCAGGCTCCAGGGAAGGGTCTAGAG
CGGGTCTCAGCTATTAATCCGCAGGGTACGCGTACATACTACGCAGACTCCGTGAAGGGC
CGGTTCACCATCTCCCGCGACAATTCCAAGAACACGCTGTATCTGCAAATGAACAGCCTG
CGTGCCGAGGACACCGCGGTATATTACTGTGCGAAACTTCCGTTTTACTTTCACGAGTGG
GGTCAGGGAACCCTGGTCACCGTCTCCAGC (SEQ ID NO: 1269)

### Example 8

### Anti-Cynomolgus CD40 dAbs

[0196] The methods disclosed herein to generate antibody polypeptides that specifically bind human CD40 may be used to generate antibody polypeptides that specifically bind CD40 of other species. For example, anti-cynomolgus (anti-cyno) CD40 antibody polypeptides can be produced using the presently disclosed methods. The anti-cynoCD40 antibody polypeptides can be generated using the same scheme of initial/primary screening and affinity maturation as anti-human CD40 dAbs, for example. Methods for obtaining anti-cynoCD40 dAbs are disclosed, and representative examples of anti-cynoCD40 dAbs are provided in TABLE 23 below.

### ELISA RBA:

[0197] Clear walled Highbind, 384 well plates (Corning, UK) were coated with 25 μl of 1 μg/ml neutravidin in carbonate buffer overnight at 4° C. The following day, assay plates were washed with 0.1% Tween PBS buffer, blocked with 1% BSA in PBS for 1 hour at room temperature, and washed again. Following removal of excess washing buffer, 25 μl of 1 μg/ml of biotinylated human IZ-CD40L (BMS, 1.2 mg/ml stock concentration) was incubated with the assay plates for 1 hour at room temperature. Simultaneously, a dilution range of purified dAb and 1 μg/ml of cynoCD40 (BMS) were complexed in a 1:1 ratio. Following washing of the assay plate, the dAb:cyno CD40 complex was incubated in the assay plate at room temperature for 2 hours with gentle agitation. Competitive binding of dAb vs. cynoCD40 to biotinylated CD40L was detected with horse radish peroxidase (HRP) conjugated anti human (Fe) secondary antibody (Sigma-Aldrich, UK). Absorbance signal was measured using a Spectromax M5e plate reader (Molecular Devices) at 450 nm following neutralization with 1M HCl.

cynoCD40 CHO Cell RBA Using AB8200 FMAT:

[0198] Stably transfected cynoCD40-expressing CHO-DG44 cells or native CHO-DG44 cells (BMS) were detached from cell culture flasks using Versene (Invitrogen). 40,000 cells per well were seeded into 96 well Highbind, black walled, clear bottom plates (Corning, UK) in 0.1% BSA PBS assay buffer with a dilution range of dAb, 0.25 μg/ml of biotinylated human IZ-CD40L (BMS, 1.2 mg/ml stock concentration), and 0.25 μg/ml of streptavidin Alexa Fluor 647 (Invitrogen, Molecular probes, UK). The mixture was incubated in the absence of light for 6 hours. Following incubation, competitive binding of dAb vs. cynoCD40 CHO cells to soluble biotinylated IZ-CD40L was assessed using relative fluorescence as measured by the AB8200 cellular detection platform (Applied Biosystems).

### CHO-hCD40L-Driven Primary Human B Cell Proliferation:

[0199] CHO cells (ATCC) were transfected with human CD40L to generate a stable cell line expressing high levels of CD40L on the cell surface. CHO-CD40L cells were irradiated at 10,000 Rads before incubation with human B cells. 1×10⁵ tonsillar human B cells were incubated with 1×10³ CHO-CD40L cells (1:100 ratio of CHO-CD40L: human B cells) along with varying titration of dAb or monoclonal antibody in a final volume of 200 μl/well in a 96-well round bottom plate. The plates were incubated at 37° C. for 72 hours, following which thymidine (³H; 0.5 μci/well) was added for 6 hours. B cell proliferation was quantified based on thymidine incorporation. All assays, unless otherwise noted, were performed in RPMI media supplemented with 10% fetal calf serum (FCS).

### Soluble IZ-hCD40L-Driven Cyno Splenic B Cell Proliferation:

[0200] 1×10⁵ B cells isolated from cynomolgous monkey spleens were incubated with 0.5 μg/ml of IZ-hCD40L along with varying titration of dAb or mAb in a final volume of 200 μl/well in a 96-well round bottom plate. The plates were incubated at 37° C. for 72 hours, following which ³H-thymidine (μci/well) was added for 6 hours. B cell proliferation was quantified based on thymidine incorporation. All assays, unless otherwise noted, were performed in RPMI media supplemented with 10% fetal calf serum (FCS).

TABLE 23

| | | | B cell proliferation assay | |
|---|---|---|---|---|
| | ELISA RBA | Cell RBA | (EC50 nM) | |
| Clone | (nM) | (nM) | Human | Cyno |
| BMS5c8 | | | | 8, 10, 12, 8, 8 |
| BMS3c-85 | 370 | | >7000, >7000 | 747, 2700, 7000, |
| | | | | 7000 |
| BMS3c-85-1 | 52, 8 | 12 | 2600, 1100 | 18, 39, 47 |
| BMS3c-85-2 | 12, 4 | 4, 17 | 1800, 800 | 2, 5, 6, 1 |
| BMS3c-85-3 | 7 | 23 | >7000, >7000 | 33, 31, 21, 31 |
| BMS3c-85-8 | 22 | 17.2 | >7000, >7000 | 33, 33, 25 |
| BMS3c-85-9 | 10 | | >7000, >7000 | >70, >70, 104 |
| BMS3c-85-21 | 11 | 18 | | 24 |
| BMS3c-85-24 | 8 | 13, 14 | | |
| BMS3c-85-25 | 62 | | | |
| BMS3c-85-26 | 3 | | 3300, 3900 | >70, >70, 385 |
| BMS3c-85-27 | 13 | 23 | | 39 |
| BMS3c-85-31 | 13 | 11, 9 | | |
| BMS3c-85-32 | 21 | 56 | | 111 |
| BMS3c-85-33 | 15 | 10, 21.3 | | 17 |
| BMS3c-85-34 | 48 | | | |
| BMS3c-85-35 | — | 19, 1.5 | >700 | 2 |
| BMS3c-85-36 | — | 28 | | |
| BMS3c-85-37 | — | 71 | | |
| BMS3c-85-38 | — | 17 | | |
| BMS3c-85-47 | — | 2.9 | >700 | <2, 0.5 |
| BMS3c-85-49 | — | 10 | >700 | 3, 3 |
| BMS3c-85-51 | — | 2.5 | >700 | 3 |
| BMS3c-85-52 | — | 8.5 | | |
| BMS3c-85-55 | — | 13.3, 6.7 | >700 | 3, 3 |
| BMS3c-85-56 | — | no convergence | | |
| BMS3c-85-57 | — | 13.8, 5.3 | >700 | 2, 4 |
| BMS3c-85-62 | — | 9.9, 2.7, 2.0 | >700 | <2, 0.63 |
| BMS3c-85-63 | — | 80.9 | | |
| BMS3c-85-64 | — | 16.1 | | |
| BMS3c-85-65 | — | 13.9, 7.4 | >700 | 3, 2 |
| BMS3c-85-67 | — | 1.5 | | 0.17 |
| BMS3c-85-69 | — | 1.8 | | 0.33 |
| BMS3c-85-72 | — | 2 | | 0.16 |
| BMS3c-85-73 | — | 2.3 | | |
| BMS3c-85-77 | — | 2.3 | | 0.2 |
| BMS3c-85-84 | — | 1.3 | | 0.21 |
| BMS3c-85-88 | — | 3 | | 0.25 |
| BMS3c-85-91 | — | 1.3 | | 0.26 |

### Example 9

### Anti-Human CD40 dAbs do not Bind CynoCD40

[0201] CynoCD40 has a Leu109 residue instead of a Trp109, as in human CD40. The amino acid sequence of Macaca fascicularis CD40 is reproduced below:

(SEQ ID NO: 2)

| | |
|---|---|
| 1 | MVRLPLQCVL WGCLLTAVYP EPPTACREKQ YLINSQCCSL |
| | CQPGQKLVSD |
| 51 | CTEFTETECL PCGESEFLDT WNRETRCHQH KYCDPNLGLR |
| | VQQKGTSETD |
| 101 | TICTCEEGLH CTSESCESCV PHRSCLPGFG VKQIATGVSD |
| | TICEPCPVGF |
| 151 | FSNVSSAFEK CRPWTSCETK DLVVQQAGTN KTDVVCGPQD |
| | RQRALVVIPI |
| 201 | CLGILFVILL LVLVFIKKVA KKPNDKVPHP KQEPQEINFP |
| | DDLPGSNPAA |
| 251 | PVQETLHGCQ PVTQEDGKES RISVQERQ |

[0202] Anti-human CD40 dAbs were tested for cross reactivity to B cells in cynomolgus monkey, rhesus macaque and chimpanzee blood, and lymphocytes from marmoset blood using flow cytometric methods. The procedures detailed below summarize methods used for CD40 dAb detection over multiple experiments. The results, shown in TABLE 24, suggest that anti-human CD40 dAbs do not bind cynoCD40. This is consistent with the evidence disclosed above (see FIGS. 1 and 2) that Trp109 in human CD40 (which is absent in cynoCD40) is important for complex formation between the dAbs and human CD40.

### Methods:

[0203] PEGylated anti-human CD40 dAbs (BMS3h-56-5C-40L and BMS3h38-2C-P40Br) or a biotin-conjugated dAb (BMS3h38-2-biotin) were incubated with human and primate blood samples on a rotator for 1 hour at 37° C. 100 μl from each blood sample was aliquoted to 12×75 mm tubes and washed 3 times with FACS buffer (0.5% FBS/PBS/0.1% sodium azide). Tubes were centrifuged for 5 minutes at 1500 rpm, and supernatants were decanted between washes. Following the washes, tubes were placed on ice and incubated with human IgG for 5 minutes to block non-specific binding via Fc receptors.

[0204] For PEGylated dAb detection, anti-PEG antibodies (clone CH-2074, Silver Lake Research or clone 2-2, Open Biosystems) were added to tubes and incubated for 30 minutes. Samples were washed once in FACS buffer, then incubated with an APC-labeled CD20 antibody (clone 2H7, BD Biosciences) and PE labeled-anti-mouse IgG (Fcγ1 specific; Calbiochem) for an additional 30 minutes on ice.

[0205] For biotin-conjugated dAb detection, PE-labeled streptavidin (Invitrogen) and APC-labeled CD₂₀ antibody (clone 2H7, BD Biosciences) were added to tubes and incubated 30 minutes at room temperature.

[0206] Additionally, to measure CD40 levels on human and primate blood, an aliquot of each blood sample was incubated with an APC-labeled CD₂₀ antibody (clone 2H7, BD Biosciences) and a PE-labeled anti-human CD40 antibody that cross reacts with primate species (clone 5C3, BD Biosciences) for 30 minutes at room temperature.

[0207] To lyse red blood cells and fix white blood cells following detection antibody incubation, FACS Lysing Solution (BD Biosciences) was added to all tubes, and samples were incubated for 15 minutes at room temperature. Samples were centrifuged and resuspended in FACS Lysing Solution, and analyzed by flow cytometry on a BD FACSCanto™, gating on CD20+ B cells for analysis. For marmoset samples, the CD₂₀ antibody was not cross reactive; therefore analysis was performed on all lymphocytes as identified by forward and side scatter properties (size).

### Results:

[0208] Binding of PEGylated and biotinylated anti-human CD40 dAbs was tested in human and primate blood samples according to the method above. Anti-human CD40 dAb binding to CD20+ B cells in human blood samples was detected. In contrast, the binding of PEGylated and biotinylated CD40 dAbs was not detected on CD20+ B cells in cynomolgus, rhesus, or chimp blood samples or on lymphocytes in marmoset blood samples. Results for BMS3h-38-2C-P40Br dAb are shown in FIG. 3, Panels A and B. Similar results were obtained for the other dAbs. Comparable levels of CD40 on the B cells of human and primate species were confirmed using an anti-human CD40 antibody that cross reacts with primate CD40. These data indicate that human CD40 dAbs from the BMS3h-56 and BMS3h-38 lineages are unable to bind CD40 in primate species. The data are consistent with the importance of the Trp109 residue in forming a complex between CD40 and the anti-CD40 dAbs, as shown in FIGS. 1 and 2.

### Example 10

### X-Ray Crystallography of a Complex Between CD40 and dAb BMS3h-56-5

### Data Collection and Processing:

[0209] Two different crystal forms were analyzed during the structure determination of the human CD40 (SEQ ID NO: 1)/BMS3h-56-5 (SEQ ID NO: 321) complex. Data were collected from a crystal of the CD40/BMS3h56-5 complex, flash-cooled to and maintained at 100 K, and mounted on a Rigaku AFC-9 goniometer. The X-ray source was a Rigaku FR-E using a copper target with MicroMax™ confocal optics and a Saturn 92 detector. Data were collected at extremely high redundancy to enhance the sulfur anomalous diffraction signal in the hopes of using that signal to phase the data. Data were processed with HKL2000 (HKL Research; Otwinowski et al., In Methods Enzymol. Macromolecular Crystallography part A, Carter et al., eds., vol. 276, p. 307-326, Academic Press, Inc., New York, N.Y. (1997)). Data collection statistics for this crystal are summarized below and in Table 24:

[0210] Space Group: I222;

[0211] Unit Cell: a=156.6 Å; b=158.3 Å; c=200.7 Å;

[0212] Mosaicity 0.59-0.84; Rejected observations: 1028; 0.06%.

TABLE 24

| | Res- | | | | % | | |
|---|---|---|---|---|---|---|---|
| | olution, | | | | Com- | R | |
| s09-167 | Å | Measured | Unique | Redun. | plete | value | I/σ₁ |
| Overall | 50.00-3.30 | 1603547 | 37772 | 42.5 | 99.8 | 0.137 | 33.7 |
| First | 50.00-8.94 | ≧38193 | 1971 | 40.1 | 97.1 | 0.049 | 58.7 |
| Shell | | | | | | | |
| Last | 3.36-3.30 | ≧37054 | 1861 | 43.6 | 99.8 | 0.439 | 12.5 |
| Shell | | | | | | | |

[0213] A second crystal form was collected from a crystal flash-cooled to 100 K and mounted on a Rayonix MX-225 detector at the Canadian Light Source beamline CMCF1 (08-ID-1) and the wavelength was 0.9793 Å. These data were collected by Shamrock Structures (R. Walter and G. Ranieri) and were processed with HKL2000. Data collection statistics for this crystal are summarized below and in Table 25:

[0214] Space Group: C2;

[0215] Unit Cell: a=199.3 Å; b=48.7 Å; c=138.8 Å; β=118.2°;

[0216] Mosaicity 0.62-0.71; Rejected observations: 70; 0.08%.

TABLE 25

| | Reso- | | | | % | | |
|---|---|---|---|---|---|---|---|
| | lution, | | | | Com- | R | |
| x09-275 | Å | Measured | Unique | Redun. | plete | value | I/σ₁ |
| Overall | 50.00-2.80 | 92545 | 29303 | 3.2 | 98.6 | 0.091 | 14.6 |
| First | 50.00-6.03 | 9265 | 3060 | 3.0 | 98.5 | 0.052 | 18.0 |
| Shell | | | | | | | |
| Last | 2.90-2.80 | 8857 | 2882 | 3.1 | 98.0 | 0.421 | 3.4 |
| Shell | | | | | | | |

### Molecular Replacement Models:

[0217] The model of the dAb, BMS3h-56-5, was derived from PDB ID 2VYR chain E residues 1-124 with sequential residues corresponding to CDRs 31-35, 50-57, and 99-111 removed by SPLIT_PDB (which corresponds to Kabat numbering 31-35, 50-56, and 95-100G) and then run through MUTATE and finally renumbered by RENUMBER. MUTATE changes non-identical residues to the minimum identical, i.e., normally Ala or Gly, but, for example Tyr→Phe and Phe→Tyr would result in Phe. It does not build any atoms, although for Thr→Val, Val→Thr, Cys→Ser, and Ser→Cys, it will substitute the appropriate atom name, but not change the position. RENUMBER changed the numbering to Kabat numbering (Kabat et al., Sequences of Immunological Interest, 5^{th} ed., U.S. Dept. Health & Human Services, Washington, D.C. (1991)), which is a standard numbering system for antibodies that makes description of CDRs and framework residues straight-forward.

[0218] A CD40 model was constructed from PDB IDs 1JMA (chain B), 1NCF (chain A), 1TNR (chain R), 2HEV (chain R), 2HEY (chains R, T), and 2UWI (chains A, B) using phenix.ensembler (University of Cambridge, UK) to create an ensemble of structures. The N-termini (residues 24-78) plus a six residue segment (residues 95-100) of these molecules were superimposable with an acceptable root mean square distance for Cα atoms, and that was used as a model for the N-terminal region of CD40.

### Molecular Replacement Methods:

[0219] The program PHASER (McCoy et al., J. Appl. Crystallogr. 40: 658-674 (2007)) was used for molecular replacement. The translation function Z-score (TFZ) and the increase in the log-likelihood gain were monitored to decide whether real solutions had been found. TFZ scores of 8 and above generally represent a solution. Lesser TFZ scores accompanied by substantial increases (>50) in the log-likelihood gain also are acceptable indicators.

### Model Building, Density Modification, and Crystallographic Refinement Methods:

[0220] Model-building tools for molecular graphics included the COOT program (Emsley et al., Acta Crystallogr Sect. D 60: 2126-2132 (2004); Emsley et al., “Features and Development of Coot,” Acta Crystallogr Sect. D 66: 486-501 (2010)). Density modification using non-crystallographic symmetry map averaging was performed using known density modification programs and other programs to calculate the Eulerian angles and translations between molecules. Refinement was run using autoBUSTER (GlobalPhasing, Ltd.: Bricogne et al., Acta Crystallogr. Sect. D 60: 2210-2221 (2004); Tronrud et al., Acta Crystallogr. Sect. A 43: 489-501 (1987)).

### Domain Antibody Numbering System:

[0221] The residue numbering system for the domain antibody follows that of Kabat. The Kabat numbering is compared to straight sequential numbering below for BMS3h-56-5:

[chemical structure]

In Kabat numbering BMS3h-56-5 has insertion residues 52A, 82A, 82B, 82C and is missing residue 100. In both numbering systems the Ser and Thr at the N-terminus that are part of the expression construct are given negative numbers.
Determination of the Structure of CD40/BMS3h-56-5 Complex:

[0222] PHASER was able to locate four BMS3h-56-5 dAb molecules in the I222 crystal form and three BMS3h-56-5 dAb molecules in the C2 crystal form. In the I222 crystal form the TFZ scores ranged from 7.6 to 41.0, and the increase in the log-likelihood gain ranged from 77 to 446. These solutions for the BMS3h-56-5 dAb molecules formed helical columns of dAb molecules through the I222 crystal that were separated from other columns by large channels. In the C2 crystal the TFZ scores ranged from 7.7 to 16.5, and the increase in the log-likelihood gain ranged from 110 to 150. The packing of the dAbs in this crystal form was not repetitive or symmetric.

[0223] Using the ensemble model for the CD40 N-terminal domain, four molecules of the N-terminal domain of CD40 could be placed in the I222 crystal form with TFZ scores ranging from 5.7 to 8.5, and the increase in the log-likelihood gain ranged from 83 to 389. The four N-terminal domains of CD40 in the I222 crystal form formed a clump equally centered between four columns of dAb molecules. However, they did not touch the BMS3h-56-5 dAb molecules. In the C2 crystal form three molecules of the N-terminal domain of CD40 could be placed with TFZ scores ranging from 5.8 to 12.1, and the increase in the log-likelihood gain ranged from 100 to 198. In this crystal form, the N-terminal domains also did not contact the BMS3h-56-5 dAb molecules.

[0224] In the I222 crystal form, the N-terminal domain of the CD40 from the CD40/Chi220 Fab complex and the N-terminal domain from 2UWI were superimposed on the CD40 N-terminal domain. The ability to associate the N-terminal with a particular BMS3h-56-5 dAb allowed the use of non-crystallographic symmetry (NCS) map averaging. The starting correlation coefficients for NCS averaging gave off-diagonal values of 0.71-0.81. The final off-diagonal values were 0.88-0.92. The electron density close to the N-terminal region was clear, and a path could be traced for CDR3 of the BMS3h-56-5 dAb. Residues 82-94 and 101-121 from the CD40/Chi220 Fab′ complex were superimposed on the corresponding residues on 2UWI and then COOT was used to improve the fit manually. This position for the second domain (residues 82-94 and 101-121) of CD40 was then transformed onto the other three N-terminal domains.

[0225] A cycle of refinement was run with R-free decreasing from 0.437 to 0.380 and R-work from 0.447 to 0.381 with improvement in root mean square bond and angle deviations from ideal. The resulting electron density map showed that residue 109 had a side chain that was consistent with Trp and that density existed for at least some residues in the C-terminal 70 residues of CD40.

[0226] Since CD40 has little secondary structure, fitting the C-terminal ˜70 residues to the electron proved difficult, so the Research Collaboratory for Structural Bioinformatics Protein Data Base was searched for a suitable model to help guide chain tracing. The top two hits with 16 out of 44 identities and 24 out of 44 matches were 2AW2 and 1JMA, which have the same sequence:

[chemical structure]

Identical residues are noted with the appropriate single letter code on the consensus line and similar residues are noted on the consensus line as asterisks. This was the same stretch of residues as for residues 41-84 of the N-terminal domain of CD40:

[chemical structure]

Identical residues are noted with the appropriate single letter code on the consensus line and similar residues are noted on the consensus line as asterisks.
Matching disulfide bonds:

Comparison of Disulfide linkages in
residues 41-84 and 125-168 of CD40

| Residues 41-84 | Residues 125-168 |
|---|---|
| C41-C59 | C125-C143 |
| [C38]-C51 | |
| C62-C77 | C146-C161 |
| C83[-C103] | C167[-C186] |

Residues in brackets fall outside of the residue ranges in the sequence repeat.

[0227] With the 1JMA/2AW2 model as a guide, the COOT program was used to fit one of the CD40 chains. This fitted model was then superimposed on one of the other three CD40 chains. However, it appeared that the position of this new stretch of residues was differently oriented in the other two CD40 chains, and they were not fitted at this time. A cycle of refinement was run with R-free decreasing from 0.393 to 0.366 and R-work from 0.400 to 0.349 with considerable improvement in root mean square bond and angle deviations from ideal.

[0228] The BMS3h-56-5 dAb from one of the molecules in the I222 crystal form was superimposed on each of the three dAbs in the C2 crystal form. That transformation matrix was used to orient the second and C-terminal domains of the I222 crystal form. The model was rebuilt using the COOT program. A cycle of refinement was run with R-free decreasing from 0.361 to 0.334 and R-work from 0.375 to 0.306 with improved root mean square bond and angle deviations from ideal. The resulting electron density map provided guidance for placing many more CD40 residues. Another cycle of refinement was run with R-free decreasing from 0.302 to 0.287 and R-work from 0.299 to 0.270 with improved root mean square bond and angle deviations from ideal

[0229] Conventional model building and refinement then were used to complete the structure determination. Several more rounds of optimization led to a final refinement with the following statistics: R-free 0.260, R-work 0.228, root mean square bonds 0.010 Å, root mean square angles 1.4°. The real space correlation coefficients are 0.92 for main-chain atoms and 0.80 for side-chain atoms. The final model had 13 water molecules.

[0230] Using the model of the C-terminal domain from the C2 crystal form as a guide, the CD40 models in I222 crystal form were further refined. Several more cycles of model building using the COOT program and refinement with the autoBUSTER program led to the following statistics: R-free 0.323, R-work 0.292, root mean square bonds 0.011 Å, root mean square angles 1.5°. The real space correlation coefficients are 0.91 for main-chain atoms and 0.80 for side-chain atoms. The model contained no water molecules.

Overall Structure of the CD40/BMS3h-56-5 Complex:

[0231] One BMS3h-56-5 dAb binds to one CD40 molecule. As shown in FIG. 1, BMS3h-56-5 binds to an epitope that is distinct from that of the antibody Chi220, which binds in the N-terminal region. CD40 residues (SEQ ID NO: 1) are shown in green, except for epitope residues. CD40 epitope residues for Chi220 are shown in blue; BMS3h-56-5 dAb epitope residues are shown in cyan. Chi220 Fab and BMS3h-56-5 β-strands are shown in red, CDR residues are shown in magenta, and other loops are shown in orange. Disulfide bonds are shown for the CD40, Chi220, and BMS3h-56-5 molecules with the sulfur atoms in yellow.

[0232] The I222 crystal form contains four crystallographically independent CD40/BMS3h-56-5 complexes, and the C2 crystal for contains three crystallographically independent CD40/BMS3h-56-5 complexes. The CD40 molecule has a certain amount of flexibility, and the domains are arrayed differently in the seven unique versions of the complex, but the overall nature of the interaction is retained in all cases.

BMS3h-56-5 dAb Epitope Residues:

[0233] The minimal CD40 epitope for BMS3h-56-5 is defined as CD40 residues containing at least one atom in van der Waals or hydrogen-bond contact with a BMS3h-56-5 atom. The minimal epitope in all the complexes contains the following CD40 residues with reference to SEQ ID NO: 1: Trp109, Leu121, His122, Ser124, Ser156, Ala157, Phe158, Glu159, and His162. The following additional residues are in van der Waals or hydrogen-bond contact in some complexes: Pro85, Asn86, Leu87, Gly88, Glu106, Glu107, Gly108, His110, Thr112, Cys119, Val120, Gln133, Ile134, Ala135, Thr136, Ser155, Lys160.

[0234] A maximal CD40 epitope is defined as residues containing atoms that are buried by a 1.7 Å probe sphere. These residues include all the residues above, plus Val 154 in all complexes. In some complexes, additional buried residues are: Ser118, Arg123, Thr141, Phe151, Asp153, Cys161, and Pro163.

[0235] A depiction of the surface of BMS3h-56-5 with contacting residues is shown in FIG. 2. Contacting BMS3h-56-5 residues are shown. Buried residues are.also shown. CD40 is represented as a cartoon with orange representing non-repetitive secondary structure and magenta representing the epitope residues. Also shown as sticks (carbon atoms in cyan) are CD40 residues Trp109, Ala115, Leu121, Ser126, and His162, which are five of the seven residues that differ between human and cynomolgus monkey (Macaca fascicularis). Ala115 and Ser126 are on the opposite side of CD40 from the BMS3h-56-5 binding site. Trp109 and Leu121 bind in a cleft of BMS-h-56-5 that lies between CDR-3 and FR-2 (BMS-3h-56-5 residues Leu45 and Arg47). His162 of CD40 interacts with Arg56 of CDR-2 of the BMS3h-56-5 dAb. Mutation of Trp109 considerably reduces or ablates BMS3h-56-5 activity.

[0236] Depending on the crystallographically independent complex, 660-740 Å² of CD40 surface area is buried with between 16-21 contacting residues represented at a finer level with contacting 46-67 atoms. For BMS3h-56-5, 660-780 Å² of surface area is buried with contacting 14-17 residues represented at a finer level with contacting 48-62 atoms. These contacts yield 3-7 hydrogen bonds and 111-142 van der Waals interactions, depending on the crystallographically independent complex.

### Example 11

### Identifying dAb Binding Epitopes on CD40

[0237] To identify dAb binding epitopes on CD40, dAb binding was tested against seven CD40-Fc fusion proteins containing specific amino acid residue substitutions at residues 76, 109, or 121. These CD40-Fc fusion proteins include wild type human CD40 (wt-hCD40), wild type cynomolgus monkey CD40 (wt-cCD40), and five mutant human CD40 proteins (M1-M5) with specific amino acid residues mutated to the corresponding residue from the sequence of cynomolgus monkey CD40 (M1, M2, M4, M5) or chimpanzee CD40 (M3). The amino acid substitutions are listed in Table 26.

[0238] The sequence of the wild type human CD40 extracellular domain (1-193) is from REFSEQ:accession NM_{—}001250.3. Cynomolgous and mutant constructs were generated using site-directed mutagenesis of the wild type sequence at the positions shown in Table 26. The extracellular domains were fused with a thrombin-cleavable linker DPGGGGGRLVPRGFGTGDP (SEQ ID NO: 1273), which was fused with human IgG1 Fc. The proteins were expressed in HEK-293-6E cells transfected with TIG-pYD7-GATE Durocher expression vectors. The supernatants were harvested after five days. Each CD40 protein was purified from conditioned media using protein A fast flow chromatography. The column was washed with PBS (20 mM sodium phosphate, 0.15 M NaCl, pH 7.2) and then eluted using 80 mM sodium acetate, pH 3, into ⅕^{th} volume of 1 M Tris-HCl, pH 8. The eluate was run on a Superdex-200 column in PBS.

TABLE 26

| Name | Short name | Residue 76 | Residue 109 | Residue 121 |
|---|---|---|---|---|
| wild type human CD40 Fc fusion | wt-hCD40 | H | W | L |
| human CD40 (H76R) Fc fusion | hCD40-M1 | R | W | L |
| human CD40 (W109L) Fc fusion | hCD40-M2 | H | L | L |
| human CD40 (W109R) Fc fusion | hCD40-M3 | H | R | L |
| (Chimpanzee CD40) | | | | |
| human CD40 (W109L, L121P) Fc | hCD40-M4 | H | L | P |
| fusion | | | | |
| human CD40 (H76R, W109L, | hCD40-M5 | R | L | P |
| L121P) Fc fusion | | | | |
| wild type cynomolgus monkey | wt-cyno- | R | L | P |
| CD40 Fe fusion | CD40 | | | |

[0239] Representative dAb's from the 3h217, 3h37, 3h38, and 3h56 lineages were assayed for their binding to CD40-Fc fusion proteins listed in Table 26. Assays were performed on a BioRad ProteOn XPR36SPR instrument. The SPR surfaces were prepared by immobilizing 8 μg/ml anti-human IgG(Fc) antibody (Biacore/GE Healthcare) in 10 mM sodium acetate pH 4.5 on a BioRad GLC sensor chip using standard ethyl(dimethylaminopropyl) carbodiimide (EDC)/N-hydroxysuccinimide (NHS) chemistry, with ethanolamine blocking. The running buffer for immobilization and kinetic binding analysis was 10 mM sodium phosphate, 130 mM sodium chloride, 0.05% tween 20, pH 7.1. CD40-Fc fusion proteins at concentrations of 20 μg/ml were captured in the vertical orientation on these surfaces via the Fc tail, and reference surfaces lacking CD40-Fc proteins were used for reference subtraction. Kinetic experiments were performed by flowing 405, 135, 45, 15, and 5 nM dAb analytes in the horizontal orientation over the captured CD40-Fc surfaces at 25° C., using a 240 s association time, and a 420 s dissociation time, at a flow rate of 30 μl/min. The surfaces were regenerated in both horizontal and vertical orientations with 30 s pulses of 3 M MgCl₂ followed by running buffer at 60 μl/min. Sensogram data was double-referenced and then fitted to a 1:1 Langmuir model using BioRad ProteOn Manager V.2.1.0.38 software, to determine the association rate constant (ka), the dissociation rate constant (kd), and the equilibrium dissociation constant (K_{D}).

[0240] All dAbs of the 3h-37, 3h-38, and 3h-56 lineages were found to bind with high affinity (K_{D}<10⁻⁸ M) to CD40-Fc fusion proteins containing the human CD40 residues W109 and L121, but binding was significantly reduced or undetectable to CD40-Fc fusion proteins with the corresponding residues from cynomolgus monkey CD40 (L109, P121) or chimpanzee CD40 (R109). This indicates that dAbs from each of the 3h37, 3h38-, and 3h56-lineages bind specifically to an epitope that includes residues 109 and 121 of human CD40. In contrast, all tested members of the 3h-217 lineage bound with similar affinity to all CD40-Fc fusion proteins tested, indicating that the members of the 3h-217 lineage bind to a site on CD40 which does not include residues 76, 109, or 121. Therefore, the 3h-217 lineage binds to a different epitope than the 3h-37, 3h-38, and 3h-56 lineages. Table 27 summarizes K_{D} values determined for dAb binding to CD40-Fc fusion proteins using SPR on a ProteOn XPR36 instrument. An “X” in Table 27 means that no evidence for binding was found under these conditions.

TABLE 27

| | | | | | | hCD40- | |
|---|---|---|---|---|---|---|---|
| | | | | | hCD40- | M5 | |
| | | hCD40- | hCD40- | hCD40- | M4 | (H76R, | |
| | wt- | M1 | M2 | M3 | (W109L, | W109L, | |
| | hCD40 | (H76R) | (W109L) | (W109R) | L121P) | L121P) | cyno CD40 |
| 3h-217-5 | 0.47, 0.48 | 0.94 | 0.99 | 0.72 | 0.93 | 1.0 | 0.9 |
| 3h-217-16 | 0.22, 0.26 | 0.35 | 0.41 | 0.27 | 0.35 | 0.5 | 0.4 |
| 3h-217-23 | 0.78, 1.5 | 1.6 | 2.0 | 1.2 | 1.6 | 2.2 | 1.9 |
| 3h-37-2 | 2.0, 2.0 | 2.6 | >1000 | X | X | X | X |
| 3h-37-11 | 1.9, 2.3 | 2.4 | >1000 | X | X | X | X |
| 3h-38-2 | 5.1, 8.0 | 7.2 | X | X | X | X | X |
| 3h-38-211 | 3.3, 6.1 | 4.0 | >1000 | X | X | X | X |
| 3h-38-215 | 2.1, 6.0 | 3.0 | >1000 | X | X | X | X |
| 3h-38-217 | 2.3, 2.4 | 3.4 | >1000 | X | X | X | X |
| 3h-56-1 | 3.0, 5.4 | 4.2 | 29 | >1000 | X | X | X |
| 3h-56-2 | 3.8, 3.2 | 6.1 | 44 | >1000 | X | X | X |
| 3h-56-5 | 5.3, 4.7 | 7.2 | 65 | >1000 | X | X | X |
| 3h-56-202 | 2.3, 1.3 | 3.3 | 160 | X | X | X | X |
| 3h-56-206 | 0.60, 1.4 | 1.0 | 55 | X | X | X | X |
| 3h-56-217 | 1.0, 1.9 | 1.4 | 2.5 | 23 | X | X | X |

[0241] Table 28 shows the association rate constant (ka), dissociation rate constant (kd), and equilibrium dissociation constant (K_{D}) determined for dAb binding to CD40-Fc fusion proteins using SPR on a ProteOn XPR36 instrument. An “X” in Table 28 means that no evidence for binding was found under these conditions.

TABLE 28

| | | ka | | Kd |
|---|---|---|---|---|
| Ligand | dAb | (1/Ms) | kd (1/s) | (nM) |
| wt-hCD40 | 3h-217-5 | 2.71 × 10⁶ | 1.27 × 10⁻³ | 0.47 |
| wt-hCD40 (repeat) | 3h-217-5 | 2.03 × 10⁶ | 9.81 × 10⁻⁴ | 0.48 |
| hCD40 M1 (H76R) | 3h-217-5 | 3.17 × 10⁶ | 2.99 × 10⁻³ | 0.94 |
| hCD40 M2 (W109L) | 3h-217-5 | 2.55 × 10⁶ | 2.51 × 10⁻³ | 0.99 |
| hCD40 M3 (W109R) | 3h-217-5 | 2.73 × 10⁶ | 1.96 × 10⁻³ | 0.72 |
| hCD40 M4 (W109L, L121P) | 3h-217-5 | 2.78 × 10⁶ | 2.59 × 10⁻³ | 0.93 |
| hCD40-M5 (H76R, W109L, L121P) | 3h-217-5 | 2.44 × 10⁶ | 2.42 × 10⁻³ | 0.99 |
| wt-cCD40 | 3h-217-5 | 2.46 × 10⁶ | 2.12 × 10⁻³ | 0.86 |
| wt-hCD40 | 3h-217-16 | 4.47 × 10⁶ | 9.91 × 10⁻⁴ | 0.22 |
| wt-hCD40 (repeat) | 3h-217-16 | 3.30 × 10⁶ | 8.47 × 10⁻⁴ | 0.26 |
| hCD40 M1 (H76R) | 3h-217-16 | 4.83 × 10⁶ | 1.68 × 10⁻³ | 0.35 |
| hCD40 M2 (W109L) | 3h-217-16 | 4.06 × 10⁶ | 1.67 × 10⁻³ | 0.41 |
| hCD40 M3 (W109R) | 3h-217-16 | 3.78 × 10⁶ | 1.04 × 10⁻³ | 0.27 |
| hCD40 M4 (W109L, L121P) | 3h-217-16 | 4.39 × 10⁶ | 1.52 × 10⁻³ | 0.35 |
| hCD40-M5 (H76R, W109L, L121P) | 3h-217-16 | 3.65 × 10⁶ | 1.70 × 10⁻³ | 0.47 |
| wt-cCD40 | 3h-217-16 | 3.44 × 10⁶ | 1.47 × 10⁻³ | 0.43 |
| wt-hCD40 | 3h-217-23 | 1.64 × 10⁶ | 1.27 × 10⁻³ | 0.78 |
| wt-hCD40 (repeat) | 3h-217-23 | 1.07 × 10⁶ | 1.63 × 10⁻³ | 1.52 |
| hCD40 M1 (H76R) | 3h-217-23 | 1.64 × 10⁶ | 2.62 × 10⁻³ | 1.59 |
| hCD40 M2 (W109L) | 3h-217-23 | 1.49 × 10⁶ | 2.91 × 10⁻³ | 1.95 |
| hCD40 M3 (W109R) | 3h-217-23 | 1.53 × 10⁶ | 1.86 × 10⁻³ | 1.22 |
| hCD40 M4 (W109L, L121P) | 3h-217-23 | 1.67 × 10⁶ | 2.68 × 10⁻³ | 1.61 |
| hCD40-M5 (H76R, W109L, L121P) | 3h-217-23 | 1.30 × 10⁶ | 2.87 × 10⁻³ | 2.21 |
| wt-cCD40 | 3h-217-23 | 1.24 × 10⁶ | 2.35 × 10⁻³ | 1.90 |
| wt-hCD40 | 3h-37-2 | 2.12 × 10⁵ | 4.17 × 10⁻⁴ | 1.96 |
| wt-hCD40 (repeat) | 3h-37-2 | 2.13 × 10⁵ | 4.26 × 10⁻⁴ | 2.00 |
| hCD40 M1 (H76R) | 3h-37-2 | 2.17 × 10⁵ | 5.62 × 10⁻⁴ | 2.58 |
| hCD40 M2 (W109L) | 3h-37-2 | | | >1000 |
| hCD40 M3 (W109R) | 3h-37-2 | | | X |
| hCD40 M4 (W109L, L121P) | 3h-37-2 | | | X |
| hCD40-M5 (H76R, W109L, L121P) | 3h-37-2 | | | X |
| wt-cCD40 | 3h-37-2 | | | X |
| wt-hCD40 | 3h-37-11 | 2.91 × 10⁵ | 5.60 × 10⁻⁴ | 1.92 |
| wt-hCD40 (repeat) | 3h-37-11 | 2.81 × 10⁵ | 6.40 × 10⁻⁴ | 2.28 |
| hCD40 M1 (H76R) | 3h-37-11 | 3.00 × 10⁵ | 7.17 × 10⁻⁴ | 2.39 |
| hCD40 M2 (W109L) | 3h-37-11 | | | >1000 |
| hCD40 M3 (W109R) | 3h-37-11 | | | X |
| hCD40 M4 (W109L, L121P) | 3h-37-11 | | | X |
| hCD40-M5 (H76R, W109L, L121P) | 3h-37-11 | | | X |
| wt-cCD40 | 3h-37-11 | | | X |
| wt-hCD40 | 3h-38-2 | 1.20 × 10⁵ | 6.08 × 10⁻⁴ | 5.07 |
| wt-hCD40 (repeat) | 3h-38-2 | 1.42 × 10⁵ | 1.14 × 10⁻³ | 8.04 |
| hCD40 M1 (H76R) | 3h-38-2 | 1.40 × 10⁵ | 1.00 × 10⁻³ | 7.15 |
| hCD40 M2 (W109L) | 3h-38-2 | | | X |
| hCD40 M3 (W109R) | 3h-38-2 | | | X |
| hCD40 M4 (W109L, L121P) | 3h-38-2 | | | X |
| hCD40-M5 (H76R, W109L, L121P) | 3h-38-2 | | | X |
| wt-cCD40 | 3h-38-2 | | | X |
| wt-hCD40 | 3h-38-211 | 1.11 × 10⁵ | 3.62 × 10⁻⁴ | 3.26 |
| wt-hCD40 (repeat) | 3h-38-211 | 1.20 × 10⁵ | 7.28 × 10⁻⁴ | 6.08 |
| hCD40 M1 (H76R) | 3h-38-211 | 1.28 × 10⁵ | 5.10 × 10⁻⁴ | 3.98 |
| hCD40 M2 (W109L) | 3h-38-211 | | | >1000 |
| hCD40 M3 (W109R) | 3h-38-211 | | | X |
| hCD40 M4 (W109L, L121P) | 3h-38-211 | | | X |
| hCD40-M5 (H76R, W109L, L121P) | 3h-38-211 | | | X |
| wt-cCD40 | 3h-38-211 | | | X |
| wt-hCD40 | 3h-38-215 | 1.37 × 10⁵ | 2.88 × 10⁻⁴ | 2.10 |
| wt-hCD40 (repeat) | 3h-38-215 | 1.36 × 10⁵ | 8.20 × 10⁻⁴ | 6.02 |
| hCD40 M1 (H76R) | 3h-38-215 | 1.75 × 10⁵ | 5.30 × 10⁻⁴ | 3.03 |
| hCD40 M2 (W109L) | 3h-38-215 | | | >1000 |
| hCD40 M3 (W109R) | 3h-38-215 | | | X |
| hCD40 M4 (W109L, L121P) | 3h-38-215 | | | X |
| hCD40-M5 (H76R, W109L, L121P) | 3h-38-215 | | | X |
| wt-cCD40 | 3h-38-215 | | | X |
| wt-hCD40 | 3h-38-217 | 1.27 × 10⁵ | 2.96 × 10⁻⁴ | 2.34 |
| wt-hCD40 (repeat) | 3h-38-217 | 1.44 × 10⁵ | 3.40 × 10⁻⁴ | 2.37 |
| hCD40 M1 (H76R) | 3h-38-217 | 1.41 × 10⁵ | 4.81 × 10⁻⁴ | 3.41 |
| hCD40 M2 (W109L) | 3h-38-217 | | | >1000 |
| hCD40 M3 (W109R) | 3h-38-217 | | | X |
| hCD40 M4 (W109L, L121P) | 3h-38-217 | | | X |
| hCD40-M5 (H76R, W109L, L121P) | 3h-38-217 | | | X |
| wt-cCD40 | 3h-38-217 | | | X |
| wt-hCD40 | 3h-56-1 | 2.52 × 10⁵ | 7.50 × 10⁻⁴ | 2.97 |
| wt-hCD40 (repeat) | 3h-56-1 | 1.93 × 10⁵ | 1.03 × 10⁻³ | 5.35 |
| hCD40 M1 (H76R) | 3h-56-1 | 2.31 × 10⁵ | 9.67 × 10⁻⁴ | 4.18 |
| hCD40 M2 (W109L) | 3h-56-1 | 1.92 × 10⁵ | 5.57 × 10⁻³ | 29.10 |
| hCD40 M3 (W109R) | 3h-56-1 | | | >1000 |
| hCD40 M4 (W109L, L121P) | 3h-56-1 | | | X |
| hCD40-M5 (H76R, W109L, L121P) | 3h-56-1 | | | X |
| wt-cCD40 | 3h-56-1 | | | X |
| wt-hCD40 | 3h-56-2 | 2.46 × 10⁵ | 9.27 × 10⁻⁴ | 3.77 |
| wt-hCD40 (repeat) | 3h-56-2 | 1.97 × 10⁵ | 6.24 × 10⁻⁴ | 3.17 |
| hCD40 M1 (H76R) | 3h-56-2 | 2.20 × 10⁵ | 1.33 × 10⁻³ | 6.05 |
| hCD40 M2 (W109L) | 3h-56-2 | 1.89 × 10⁵ | 8.30 × 10⁻³ | 43.90 |
| hCD40 M3 (W109R) | 3h-56-2 | | | >1000 |
| hCD40 M4 (W109L, L121P) | 3h-56-2 | | | X |
| hCD40-M5 (H76R, W109L, L121P) | 3h-56-2 | | | X |
| wt-cCD40 | 3h-56-2 | | | X |
| wt-hCD40 | 3h-56-5 | 1.78 × 10⁵ | 9.38 × 10⁻⁴ | 5.26 |
| wt-hCD40 (repeat) | 3h-56-5 | 1.53 × 10⁵ | 7.19 × 10⁻⁴ | 4.69 |
| hCD40 M1 (H76R) | 3h-56-5 | 1.69 × 10⁵ | 1.21 × 10⁻³ | 7.18 |
| hCD40 M2 (W109L) | 3h-56-5 | 1.38 × 10⁵ | 8.89 × 10⁻³ | 64.60 |
| hCD40 M3 (W109R) | 3h-56-5 | | | >1000 |
| hCD40 M4 (W109L, L121P) | 3h-56-5 | | | X |
| hCD40-M5 (H76R, W109L, L121P) | 3h-56-5 | | | X |
| wt-cCD40 | 3h-56-5 | | | X |
| wt-hCD40 | 3h-56-202 | 1.82E+05 | 4.15 × 10⁻⁴ | 2.27 |
| wt-hCD40 (repeat) | 3h-56-202 | 1.77E+05 | 2.21 × 10⁻⁴ | 1.25 |
| hCD40 M1 (H76R) | 3h-56-202 | 1.76E+05 | 5.79 × 10⁻⁴ | 3.29 |
| hCD40 M2 (W109L) | 3h-56-202 | 1.35E+05 | 2.00 × 10⁻² | 155.00 |
| hCD40 M3 (W109R) | 3h-56-202 | | | X |
| hCD40 M4 (W109L, L121P) | 3h-56-202 | | | X |
| hCD40-M5 (H76R, W109L, L121P) | 3h-56-202 | | | X |
| wt-cCD40 | 3h-56-202 | | | X |
| wt-hCD40 | 3h-56-206 | 6.48E+05 | 3.89 × 10⁻⁴ | 0.60 |
| wt-hCD40 (repeat) | 3h-56-206 | 3.27E+05 | 4.72 × 10⁻⁴ | 1.44 |
| hCD40 M1 (H76R) | 3h-56-206 | 5.65E+05 | 5.45 × 10⁻⁴ | 0.96 |
| hCD40 M2 (W109L) | 3h-56-206 | 3.38E+05 | 2.00 × 10⁻² | 54.70 |
| hCD40 M3 (W109R) | 3h-56-206 | | | X |
| hCD40 M4 (W109L, L121P) | 3h-56-206 | | | X |
| hCD40-M5 (H76R, W109L, L121P) | 3h-56-206 | | | X |
| wt-cCD40 | 3h-56-206 | | | X |
| wt-hCD40 | 3h-56-217 | 4.71E+05 | 4.70 × 10⁻⁴ | 1.00 |
| wt-hCD40 (repeat) | 3h-56-217 | 2.91E+05 | 5.46 × 10⁻⁴ | 1.87 |
| hCD40 M1 (H76R) | 3h-56-217 | 4.45E+05 | 6.35 × 10⁻⁴ | 1.43 |
| hCD40 M2 (W109L) | 3h-56-217 | 4.25E+05 | 1.05 × 10⁻³ | 2.48 |
| hCD40 M3 (W109R) | 3h-56-217 | 2.91E+05 | 6.70 × 10⁻³ | 23.00 |
| hCD40 M4 (W109L, L121P) | 3h-56-217 | | | X |
| hCD40-M5 (H76R, W109L, L121P) | 3h-56-217 | | | X |
| wt-cCD40 | 3h-56-217 | | | X |

### Example 12

### Construction of Fc Fusion Polypeptides

[0242] Antibody polypeptides comprising dAbs can be constructed in various configurations, as disclosed herein. In this example, various dAbs were fused with a Fc domain to generate Fc fusion polypeptides of anti-human CD40 variable domain constructs such as 3h37-202, 3h37-235, 3h37-258, and 3h37-202.

[0243] In one representative example, the dAb BMS3h-56-269 (SEQ ID NO: 417) was fused with a modified IgG1 (IgG1*) Fe domain (SEQ ID NO: 1284). In the dAb-IgG1* Fe domain fusion polypeptide, the C-terminus of dAb BMS3h-56-269 was fused to a linker tripeptide having the sequence Ala-Ser-Thr, which in turn was fused with the IgG1* Fc domain (SEQ ID NO: 1284). The IgG1* Fc domain contained the modification C5S, referring to the numbering of positions in SEQ ID NO: 1284. C5 of the IgG1 Fc domain normally forms a disulfide bond with a Cys residue in the light chain of an IgG molecule. The IgG1* Fc domain also contained C11S and C14S mutations to eliminate interchain disulfide bonds in the IgG1 hinge region. Finally, the IgG1* Fc domain contained a P23S mutation to lower Fc domain effector function. The dAb-IgG1* Fc fusion polypeptide has the following sequence, where the Ala-Ser-Thr linker is in bold font and the modifications to the Fc domain are in bold italics:

(SEQ ID NO: 1286)

| | |
|---|---|
| 1 | EVQLLESGGG LVQPGGSLRL SCAASGFTFR DYEMWWVRQA |
| | PGKGLERVSA |
| 51 | INPQGTRTYY ADSVKGRFTI SRDNSKNTLY LQMNSLRAED |
| | TAVYYCAKLP |
| 101 | FRFSDRGQGT LVTVSSASTE PKS [symbol] DKTHT [symbol] PP [symbol] PAPELLG |
| | G [symbol] SVFLFPPK |
| 151 | PKDTLMISRT PEVTCVVVDV SHEDPEVKFN WYVDGVEVHN |
| | AKTKPREEQY |
| 201 | NSTYRVVSVL TVLHQDWLNG KEYKCKVSNK ALPAPIEKTI |
| | SKAKGQPREP |
| 251 | QVYTLPPSRD ELTKNQVSLT CLVKGFYPSD IAVEWESNGQ |
| | PENNYKTTPP |
| 301 | VLDSDGSFFL YSKLTVDKSR WQQGNVFSCS VMHEALHNHY |
| | TQKSLSLSPG |
| 351 | K |

The dAb-IgG1* Fc fusion polypeptide depicted in SEQ ID NO: 1286 is a monomer having a calculated molecular weight of 39,127 Da. It can form a dimer having a calculated molecular weight of 78,254 Da.

[0244] dAb BMS3h-56-269 (SEQ ID NO: 417) alternatively was fused with a human IgG₄ Fc domain (SEQ ID NO: 1285). The C-terminus of dAb BMS3h-56-269 was again fused to the Ala-Ser-Thr linker, which was fused with the IgG₄ Fc domain (SEQ ID NO: 1285). The IgG₄ Fc domain contained the modification S10P, referring to the numbering of positions in SEQ ID NO: 1285. The BMS3h-56-269-IgG₄ Fc fusion polypeptide has the following sequence, where the Ala-Ser-Thr linker is in bold font and the S10P modification is in bold italics:

(SEQ ID NO: 1287)

| | |
|---|---|
| 1 | EVQLLESGGG LVQPGGSLRL SCAASGFTFR DYEMWWVRQA |
| | PGKGLERVSA |
| 51 | INPQGTRTYY ADSVKGRFTI SRDNSKNTLY LQMNSLRAED |
| | TAVYYCAKLP |
| 101 | FRFSDRGQGT LVTVSSASTE SKYGPPCP [symbol] C PAPEFLGGPS |
| | VFLFPPKPKD |
| 151 | TLMISRTPEV TCVVVDVSQE DPEVQFNWYV DGVEVHNAKT |
| | KPREEQFNST |
| 201 | YRVVSVLTVL HQDWLNGKEY KCKVSNKGLP SSIEKTISKA |
| | KGQPREPQVY |
| 251 | TLPPSQEEMT KNQVSLTCLV KGFYPSDIAV EWESNGQPEN |
| | NYKTTPPVLD |
| 301 | SDGSFFLYSR LTVDKSRWQE GNVFSCSVMH EALHNHYTQK |
| | SLSLSLGK |

The BMS3h-56-269-IgG4 Fc fusion polypeptide depicted in SEQ ID NO: 1287 is a monomer having a calculated molecular weight of 38,867 Da. It can form a dimer having a calculated molecular weight of 77,734 Da.

[0245] The sequences of BMS3h-56-269 (SEQ ID NO: 417), BMS3h-56-269-IgG1* Fc fusion polypeptide (SEQ ID NO: 1286), and BMS3h-56-269-IgG₄ Fc fusion polypeptide (SEQ ID NO: 1287) are aligned below, where the start of the Fc domain is marked by an arrow:

[chemical structure]

[0246] The Fc fusion polypeptides were expressed using the cell culture methods disclosed in Example 11. The column was washed with PBS (20 mM sodium phosphate, 0.15 M NaCl, pH 7.2) and then eluted using 80 mM sodium acetate, pH 3, into ⅕^{th} volume of 1 M Tris-HCl, pH 8. The eluate was run on a Superdex-200 column in PBS.

### Example 13

### CD40 Fc Fusion Polypeptide Acitivity Assays

[0247] Anti-human CD40 Fc Fusion Polypeptides were assayed functionally for their ability to antagonize CD40 activities. The CD40 activities tested were B cell proliferation and cytokine production by hCD40L-driven activation of primary human monocyte-derived dendritic cells (DCs). B cell proliferation and cytokine production were measured using the assays disclosed in Example 6. Unless otherwise noted, all assays were performed in RPMI media supplemented with 10% fetal calf serum (FCS). The dAb-Fc domain fusion polypeptides exhibited potent inhibition (i.e., antagonism) of CD40-dependent activation. There were no agonistic properties noted among any of the humanCD40-specific dAb-Fc domain fusion polypeptides. The results using the various assays are shown in TABLE 29. 3h56-269-IgG4 was assayed for its binding to immobilized human-CD40 using the assays disclosed in Example 11. For 3h56-269-IgG4, the apparent avidity influenced Kd value for binding immobilized human-CD40 is measured at 30 pM at 25 C and 40 pM at 37 C.

TABLE 29

| | | CHO- | | | | |
|---|---|---|---|---|---|---|
| | | hCD40L- | | CHO- | CHO- | |
| | hIZCD40L- | driven | | hCD40L- | hCD40L- | CHO- |
| | driven | Human B | | driven DC | driven DC | hCD40L- |
| | Human B | Cell | T-B cell | Activation | Activation | driven DC |
| | Cell | Proliferation | MLR | TNF | IL-6 | Activation |
| | Proliferation | EC50 | EC50 | EC50 | EC50 | IL-12 |
| dAb-Fc | EC50 (nM) | (nM) | (nM) | (nM) | (nM) | EC50 (nM) |
| 3h37- | 0.16 ± 0.08 | 5.0, 3.0 | 5.0, 6.0 | | | 0.53 ± 0.1 |
| 202- | | | | | | |
| IgG4 | | | | | | |
| 3h37- | 0.27, 0.22 | 3.0, 7.0 | | | | 0.74 ± 0.2 |
| 202- | | | | | | |
| IgG1* | | | | | | |
| 3h38- | 0.20, 0.15 | 6.0, 10.0 | 16.7 ± 5.7 | | | 0.67 ± 0.3 |
| 235- | | | | | | |
| IgG4 | | | | | | |
| 3h38- | 0.25 ± 0.1 | 4.0 ± 1.0 | | | | 0.88 ± 0.3 |
| 235- | | | | | | |
| IgG1* | | | | | | |
| 3h56- | 0.16 ± 0.05 | 1.0 ± 0.8 | 2.4 ± 0.99 | 0.22 ± 0.08 | 0.11 ± 0.05 | 0.3 ± 0.2 |
| 258- | | | | | | |
| IgG4 | | | | | | |
| 3h56- | 0.063 ± 0.03 | 0.6 ± 0.4 | 2.0 ± 0.63 | | | 0.31 ± 0.1 |
| 258- | | | | | | |
| IgG1* | | | | | | |
| 3h56- | 0.028 ± 0.01 | 0.27 ± 0.08 | 0.52 ± 0.07 | 0.16 ± 0.03 | 0.09 ± 0.02 | 0.092 ± 0.03 |
| 269- | | | | | | |
| IgG4 | | | | | | |
| 3h56- | 0.025 ± 0.01 | 0.25 ± 0.04 | 0.53 ± 0.1 | 0.27 ± 0.06 | 0.15 ± 0.05 | 0.14 ± 0.06 |
| 269- | | | | | | |
| IgG1* | | | | | | |

Although the present embodiments have been described in detail with reference to examples above, it is understood that various modifications can be made without departing from the spirit of these embodiments, and would be readily known to the skilled artisan.

The application's sequence listing, which the Patent Office published only in electronic form, follows.

SEQUENCE LISTING (1287 sequences)

SEQ ID NO: 1 - protein, 277 aa, Homo sapiens
MVRLPLQCVLWGCLLTAVHPEPPTACREKQYLINSQCCSLCQPGQKLVSDCTEFTETECLPCGESEFLDTWNRETHCHQHKYCDPNLGLRVQQKGTSETDTICTCEEGWHCTSEACESCVLHRSCSPGFGVKQIATGVSDTICEPCPVGFFSNVSSAFEKCHPWTSCETKDLVVQQAGTNKTDVVCGPQDRLRALVVIPIIFGILFAILLVLVFIKKVAKKPTNKAPHPKQEPQEINFPDDLPGSNTAAPVQETLHGCQPVTQEDGKESRISVQERQ

SEQ ID NO: 2 - protein, 278 aa, Macaca fascicularis
MVRLPLQCVLWGCLLTAVYPEPPTACREKQYLINSQCCSLCQPGQKLVSDCTEFTETECLPCGESEFLDTWNRETRCHQHKYCDPNLGLRVQQKGTSETDTICTCEEGLHCTSESCESCVPHRSCLPGFGVKQIATGVSDTICEPCPVGFFSNVSSAFEKCRPWTSCETKDLVVQQAGTNKTDVVCGPQDRQRALVVIPICLGILFVILLLVLVFIKKVAKKPNDKVPHPKQEPQEINFPDDLPGSNPAAPVQETLHGCQPVTQEDGKESRISVQERQ

SEQ ID NO: 3 - protein, 119 aa, Artificial Sequence
  Description of Artificial Sequence: Synthetic polypeptide
EVQLLESGGGLVQPGGSLRLSCAASGFTFRDYEMWWVRQAPGKGLERVSAINPQGTRTYYADSVMGRFTISRDNSKNTLYLQMNSLRAEDTAVYYCAKLPFTFDDWGQGTLVTVSSAAA

SEQ ID NO: 4 - protein, 25 aa, Artificial Sequence
  Description of Artificial Sequence: Synthetic peptide
  misc_feature (1)..(25): This sequence may encompass 1 to 5 "Gly Gly Gly Gly Ser" repeating units
GGGGSGGGGSGGGGSGGGGSGGGGS

SEQ ID NO: 5 - protein, 3 aa, Artificial Sequence
  Description of Artificial Sequence: Synthetic peptide
AST

SEQ ID NO: 6 - protein, 6 aa, Artificial Sequence
  Description of Artificial Sequence: Synthetic peptide
TVAAPS

SEQ ID NO: 7 - protein, 3 aa, Artificial Sequence
  Description of Artificial Sequence: Synthetic peptide
TVA

SEQ ID NO: 8 - protein, 7 aa, Artificial Sequence
  Description of Artificial Sequence: Synthetic peptide
ASTSGPS

SEQ ID NO: 9 - protein, 116 aa, Artificial Sequence
  Description of Artificial Sequence: Synthetic polypeptide
EVQLLESGGGLVQPGGSLRLSCAASGFTFRDYEMWWVRQAPGKGLERVSAINPQGTRTYYADSVKGRFTISRDNSKNTLYLQMNSLRAEDTAVYYCAKLPFYFQEWGQGTLVTVSS

SEQ ID NO: 10 - protein, 116 aa, Artificial Sequence
  Description of Artificial Sequence: Synthetic polypeptide
EVQLLESGGGLVQPGGSLRLSCAASGFTFRDYEMWWVRQAPGKGLERVSAINPQGTRTYYADSVKGRFTISRDNSKNTLYLQMNSLRAEDTAVYYCAKLPFYFHEWGQGTLVTVSS

SEQ ID NO: 11 - protein, 116 aa, Artificial Sequence
  Description of Artificial Sequence: Synthetic polypeptide
EVQLLESGGGLVQPGGSLRLSCAASGFTFEWYEMQWVRQAPGKGLEWVSAISGDGYRTYYADSVKGRFTISRDNSKNTLYLQMNSLRAEDTAVYYCAKELGYFDYWGQGTLVTVSS

SEQ ID NO: 12 - protein, 116 aa, Artificial Sequence
  Description of Artificial Sequence: Synthetic polypeptide
EVQLLESGGGLVQPGGSLRLSCAASGFTFEEEEMIWVRQAPGKGLEWVSAISGSGGSTYYADSVKGRFTISRDNSKNTLYLQMNSLRAEDTAVYYCAKEPFRFDYWGQGTLVTVSS

SEQ ID NO: 13 - protein, 116 aa, Artificial Sequence
  Description of Artificial Sequence: Synthetic polypeptide
EVQLLESGGGLVQPGGSLRLSCAASGFTFTEYEMIWVRQAPGKGLEWVSSISGNGANTYYADSVKGRFTISRDNSKNTLYLQMNSLRAEDTAVYYCAKEPLRFDYWGQGTLVTVSS

SEQ ID NO: 14 - protein, 123 aa, Artificial Sequence
  Description of Artificial Sequence: Synthetic polypeptide
EVQLLESGGGLVQPGGSLRLSCTASGFTFNMYEMSWVRQAPGKGLEWVSGISRRGFTTYYADSVKGRFTISRDNSKNTLYLQMNSLRAEDTAVYYCAKEPITYAMRYARFDYWGQGTLVTVSS

SEQ ID NO: 15 - protein, 116 aa, Artificial Sequence
  Description of Artificial Sequence: Synthetic polypeptide
EVQLLESGGGLVQPGGSLRLSCAASGFTFRDYEMWWVRQAPGKGLERVSAINPQGTRTYYADSVKGRFTISRDNSKNTLYLQMNSLRAEDTAVYYCAKLPFIFDYWGQGTLVTVSS

SEQ ID NO: 16 - protein, 119 aa, Artificial Sequence
  Description of Artificial Sequence: Synthetic polypeptide
EVQLLESGGGLVQPGGSLRLSCAASGFTFSTYHMQWVRQAPGKGLEWVSMIDADGLGTYYADSVKGRFTISRDNSKNTLYLQMNSLRAEDTAVYYCAKPGPQFGQFDYWGQGTLVTVSS

SEQ ID NO: 17 - protein, 121 aa, Artificial Sequence
  Description of Artificial Sequence: Synthetic polypeptide
EVQLLESGGGLVQPGGSLRLSCAASGFTFSGYDMQWVRQAPGKGLEWVSTISASGVFTYYADSVKGRFTTSRDNSKNTLYLQMNSLRAEDTAVYYCAKYPNRFALNNFDYWGQGTLVTVSS

SEQ ID NO: 18 - protein, 108 aa, Artificial Sequence
  Description of Artificial Sequence: Synthetic polypeptide
DIQMTQSPSSLSASVGDRVTITCRANSSILWALAWYQQKPGKAPKLLIESSSGLQSGVPSRFSGSGSGTDFTLTISSLQPEDFATYYCVQNAGWPGTFGQGTKVEIKR

SEQ ID NO: 19 - protein, 108 aa, Artificial Sequence
  Description of Artificial Sequence: Synthetic polypeptide
DIQMTQSPSSLSASVGDRVTITCRASQTIERRLNWYQQKPGKAPKLLIYLASRLQSGVPSRFSGSGSGTDFTLTISSLQPEDFATYYCHQYASPPLTFGQGTKVEIKR

SEQ ID NO: 20 - protein, 116 aa, Artificial Sequence
  Description of Artificial Sequence: Synthetic polypeptide
EVQLLESGGGLVQPGGSLRLSCAASGFTFAGYEMWWVRQAPGKGLERVSAISGSGGSTYYADSVKGRFTISRDDSKNTLYLQMNSLRAEDTAVYYCAKDPYSFDYWGQGTLVTVSS

SEQ ID NO: 21 - protein, 120 aa, Artificial Sequence
  Description of Artificial Sequence: Synthetic polypeptide
EVQLLESGGGLVQPGGSLRLSCAASGFTFPTAEMVWVRQAPGKGLEWVSSISASGGSTYYADSVKGRFTISRDNSKNTLYLQMNSLRAEDTAVYYCAKEPVSYVATFDYWGQGTLVTVSS

SEQ ID NO: 22 - protein, 108 aa, Artificial Sequence
  Description of Artificial Sequence: Synthetic polypeptide
DIQMTQSPSSLSASVGDRVTITCRASHFIGTLLSWYQQKPGKAPKLLITYGSLLQSGVPSRFSGSGSGTDFTLTISSLQPEDFATYYCGQGVLWPATFGQGTKVEIKR

SEQ ID NO: 23 - protein, 119 aa, Artificial Sequence
  Description of Artificial Sequence: Synthetic polypeptide
EVQLLESGGGLVQPGGSLRLSCAASGFTFPKNEMTWVRQAPGKGLEWVSAIESDGQATYYADSVKGRFTISRDNSKNTLYLQMNSLRAEDTAVYYCAKNRIPDLVFDYWGQGTLVTVSS

SEQ ID NO: 24 - protein, 119 aa, Artificial Sequence
  Description of Artificial Sequence: Synthetic polypeptide
EVQLLESGGGLVQPGGSLRLSCAASGFTFDAGAMTWVRQAPGKGLEWVSSIDKEGLSTYYADSVKGRFTISRDNSKNTLYLQMNSLRAEDTAVYYCAKGRIPGLVFDYWGQGTLVTVSS

SEQ ID NO: 25 - protein, 119 aa, Artificial Sequence
  Description of Artificial Sequence: Synthetic polypeptide
EVQLLESGGGLVQPGGSLRLSCAASGFTFGDAAMTWVRQAPGKGLEWVSAIQPMGDGTYYADSVKGRFTVSRDNSKNTLYLQMNSLRAEDTAVYYCAKGRIPTLQFDYWGQGTLVTVSS

SEQ ID NO: 26 - protein, 119 aa, Artificial Sequence
  Description of Artificial Sequence: Synthetic polypeptide
EVQLLESGGGLVQPGGSLRLSCAASGFTFEDSPMTWVRQAPGKGLEWVSAITSNGYETYYADSVKGRFTISRDNSKNTLYLQMNSLRAEDTAVYYCAKGRIPTLHFDYWGQGTLVTVSS

SEQ ID NO: 27 - protein, 119 aa, Artificial Sequence
  Description of Artificial Sequence: Synthetic polypeptide
EVQLLESGGGLVQPGGSLRLSCAASGFTFDEHDMSWVRQAPGKGLEWVSRIGPDGFHTYYADSVKGRFTISRDNSKNTLYLQMNSLRAEDTAVYYCAKGRIPTLHFDYWGQGTLVTVSS

SEQ ID NO: 28 - protein, 119 aa, Artificial Sequence
  Description of Artificial Sequence: Synthetic polypeptide
EVQLLESGGGLVQPGGSLRLSCAASGFTFGEYHMSWVRQAPGKGLEWVSRITPLGTLTYYADSVKGRFTISRDNSKNTLYLQMNSLRAEDTAVYYCAKGRIPSLTFDYWGQGTLVTVSS

SEQ ID NO: 29 - protein, 119 aa, Artificial Sequence
  Description of Artificial Sequence: Synthetic polypeptide
EVQLLESGGGLVQPGGSLRLSCAASGFTFGTNAMSWVRQAPGKGLEWVSRISPGGDYTYYADSVKGRFTISRDNSKNTLYLQMNSLRAEDTAVYYCAKGRVPDLLFDYWGQGTLVTVSS

SEQ ID NO: 30 - protein, 119 aa, Artificial Sequence
  Description of Artificial Sequence: Synthetic polypeptide
EVQLLESGGGLVQPGGSLRLSCAASGFTFPSEEMSWVRQAPGKGLEWVSRISADGANTYYADSVKGRFTISRDNSKNTLYLQMNSLRAEDAAVYYCAKGRVPDLLFDYWGQGTLVTVSS

SEQ ID NO: 31 - protein, 119 aa, Artificial Sequence
  Description of Artificial Sequence: Synthetic polypeptide
EVQLLESGGGLVQPGGSLRLSCAASGFTFAEDDMTWVRQAPGKGLEWVSRIAVDGDRTYYADSVKGRFTISRDNSKNTLYLQMNSLRAEDTAVYYCAKGKVPSLHFDYWGQGTLVTVSS

SEQ ID NO: 32 - protein, 119 aa, Artificial Sequence
  Description of Artificial Sequence: Synthetic polypeptide
EVQLLESGGGLVQPGGSLRLSCAASGFTFRTMDMSWVRQAPGKGLEWVSRITGDGMNTYYADSVKGRFTISRDNSKNTLYLQMNSLRAGDTAVYYCAKGVTPDLTFDYWGQGTLVTVSS

SEQ ID NO: 33 - protein, 119 aa, Artificial Sequence
  Description of Artificial Sequence: Synthetic polypeptide
EVQLLESGGGLVQPGGSLRLSCAASGFTFERDDMTWVRQAPGKGLEWVSRINAGGVHTYYADSVKGRFTISRDNSKNTLYLQMNSLRAEDTAVYYCAKGVTPDLTFDYWGQGTLVTVSS

SEQ ID NO: 34 - protein, 119 aa, Artificial Sequence
  Description of Artificial Sequence: Synthetic polypeptide
EVQLLESGGGLVQPGGSLRLSCAASGFTFDDDSMTWVRQAPGKGLEWVSRISSDGASTYYADSVKGRFTISRDNSKNTLYLQMNSLRAEDTAVYYCAKGVTPDLTFDYWGQGTLVTVSS

SEQ ID NO: 35 - protein, 119 aa, Artificial Sequence
  Description of Artificial Sequence: Synthetic polypeptide
EVQLLESGGGLVQPGGSLRLSCAASGFTFTEEDMTWVRQAPGKGLEWVSRIDSVGEGTYYADSVKGRFTISRDNSKNTLYLQMNSLRAEDTAVYYCAKGVTPDLTFDYWGQGTLVTVSS

SEQ ID NO: 36 - protein, 119 aa, Artificial Sequence
  Description of Artificial Sequence: Synthetic polypeptide
EVQLLESGGGLVQPGGSLRLSCAASGFTFSDSAMSWVRQAPGKGLEWVSRIDNPGQHTYYADSVKGRFTISRDNSKNTLYLQMNSLRAEDTAVYYCAKGTVPTLEFDYWGQGTLVTVSS

SEQ ID NO: 37 - protein, 119 aa, Artificial Sequence
  Description of Artificial Sequence: Synthetic polypeptide
EVQLLESGGGLVQPGGSLRLSCAASGFTFGQHSMTWVRQAPGKGLEWVSRIDGGGYNTYYADSVKGRFTISRDNSKNTLYLQMNSLRAEDTAVYYCAKGEVPRLHFDYWGQGTLVTVSS

SEQ ID NO: 38 - protein, 119 aa, Artificial Sequence
  Description of Artificial Sequence: Synthetic polypeptide
EVQLLESGGGLVQPGGSLRLSCAASGFTFGQEPMTWVRQAPGKGLEWVSRIAYNGGDTYYADSVKGRFTISRDNSKNTLYLQMNSLRAEDTAVYYCAKGITPNLTFDYWGQGTLVTVSS

SEQ ID NO: 39 - protein, 119 aa, Artificial Sequence
  Description of Artificial Sequence: Synthetic polypeptide
EVQLLESGGGLVQPGGSLRLSCAASGFTFENYPMSWVRQAPGKGLEWVSRINATGSITYYADSVKGRFTISRDNSKNTLYLQMNSLRAEDTAVYYCAKGVIPHLMFDYWGQGTLVTVSS

SEQ ID NO: 40 - protein, 119 aa, Artificial Sequence
  Description of Artificial Sequence: Synthetic polypeptide
EVQLLESGGGLVQPGGSLRLSCAASGFTFRDYDMSWVRQAPGKGLEWVSRITGTGNSTYYADSVKGRFTISRDNSKNTLYLQMNSLRAEDTAVYYCAQGVVPYLAFDYWGQGTLVTVSS

SEQ ID NO: 41 - protein, 119 aa, Artificial Sequence
  Description of Artificial Sequence: Synthetic polypeptide
EVQLLESGGGLVQPGGSLRLSCAASGFTFEADAMTWVRQAPGKGLEWVSRINVDGDRTYYADSVKGRFTISRDNSKNTLYLQMNSLRAEDTAVYYCAKGTVPTLEFDYWGQGTLVTVSS

SEQ ID NO: 42 - protein, 119 aa, Artificial Sequence
  Description of Artificial Sequence: Synthetic polypeptide
EVQLLESGGGLVQPGGSLRLSCAASGFTFDRADMTWVRQAPGKGLEWVSRISGEGKCTYYADSVKGRFTISRDNSKNTLYLQMNSLRAEDTAVYYCAKGMVPNLVFDYWGQGTLVTVSS

SEQ ID NO: 43 - protein, 119 aa, Artificial Sequence
  Description of Artificial Sequence: Synthetic polypeptide
EVQLLESGGGLVQPGGSLRLSCAASGFTFHWEPMSWVRQAPGKGLEWVSRINSSGWDTYYADSVKGRFTISRDNSKNTLYLQMNSLRAEDTAVYYCAKGMVPNLVFDYWGQGTLVTVSS

SEQ ID NO: 44 - protein, 119 aa, Artificial Sequence
  Description of Artificial Sequence: Synthetic polypeptide
EVQLLESGGGLVQPGGSLRLSCAASGFTFADEPMTWVRQAPGKGLEWVSRIPPEGAPTYYADSVKGRFTISRDNSKNTLYLQMNSLRAEDTAVYYCAKGITPNLTFDYWGQGTLVTVSS

SEQ ID NO: 45 - protein, 119 aa, Artificial Sequence
  Description of Artificial Sequence: Synthetic polypeptide
EVQLLESGGGLVQPGGSLRLSCAASGFTFHNHDMSWVRQAPGKGLEWVSRISRGGLQTYYADSVKGRFTISRDNSKNTLYLQMNSLRAEDTAVYYCAKGIVPDLHFDYWGQGTLVTVSS

SEQ ID NO: 46 - protein, 119 aa, Artificial Sequence
  Description of Artificial Sequence: Synthetic polypeptide
EVQLLESGGGLVQPGGSLRLSCAASGFTFNEYPMSWVRQAPGKGLEWVSRINGDGANTYYADSVKGRFTISRDNSKNTLYLQMNSLRAEDTAVYYCAKGIIPAMQFDYWGQGTLVTVSS

SEQ ID NO: 47 - protein, 119 aa, Artificial Sequence
  Description of Artificial Sequence: Synthetic polypeptide
EVQLLESGGGLVQPGGSLRLSCAASGFTFGDVPMSWVRQAPGKGLEWVSRIDPYGSNTYYADSVKGRFTISRDNSKNTLYLQMNSLRAEDTAVYYCAKGIMPSLTFDYWGQGTLVTVSS

SEQ ID NO: 48 - protein, 119 aa, Artificial Sequence
  Description of Artificial Sequence: Synthetic polypeptide
EVQLLESGGGLVQPGGSLRLSCAASGFTFADYDMSWVRQAPGKGLEWVSRISALGATTYYADSVKGRFTISRDNSKNTLYLQMNSLRAEDTAVYYCAKGQLPALEFDYWGQGTLVTVSS

SEQ ID NO: 49 - protein, 119 aa, Artificial Sequence
  Description of Artificial Sequence: Synthetic polypeptide
EVQLLESGGGLVQPGGSLRLSCAASGFTFKRYYMTWVRQAPGKDLEWVSGIVPSGNRTYYADSVKGRFTISRDNSKNTLYLQMNSLRAEDTAVYYCAKGRIPDLHFDYWGQGTLVTVSS

SEQ ID NO: 50 - protein, 122 aa, Artificial Sequence
  Description of Artificial Sequence: Synthetic polypeptide
EVQLLESGGGLVQPGGSLRLSCAASGFTFADYDMTWVRQAPGKGLEWVSRISPTGGQTYYADSVKGRFTISRDNSKNTLYLQMNSLRAEDTAVYYCAKGVIPYLSFSPFDYWGQGTLVTVSS

SEQ ID NO: 51 - protein, 122 aa, Artificial Sequence
  Description of Artificial Sequence: Synthetic polypeptide
EVQLLESGGGLVQPGGSLRLSCAASGFTFSKYWMGWARQAPGKGLEWVSSIDSHGAGTYYADSVKGRFTISRDNSKNTLYLQMNSLRVEDTAVYYCAKGAPKFMTTYTFDYWGQGTLVTVSS

SEQ ID NO: 52 - protein, 117 aa, Artificial Sequence
  Description of Artificial Sequence: Synthetic polypeptide
EVQLLESGGGLVQPGGSLRLSCAASGFTFLSYPMHWVRQAPGKGLEWVSSIDSRGSVTYYADSVKGRFTISRDNSKNTLYLQMNSLRAEDTAVYYCAKGHSWTFDYWGQGTLVTVSS

SEQ ID NO: 53 - protein, 119 aa, Artificial Sequence
  Description of Artificial Sequence: Synthetic polypeptide
EVQLLESGGGLVQPGGSLRLSCAASGFTFANSNMTWVRQAPGKGLEWVSRINPDGGSTYYADSVKGRFTISRDNSKNTLYLQMNSLRAEDTAVYYCAEGRIPTLHFDYWGQGTLVTVSS

SEQ ID NO: 54 - protein, 119 aa, Artificial Sequence
  Description of Artificial Sequence: Synthetic polypeptide
EVQLLESGGGLVQPGGSLRLSCAASGFTFGPRRMGWVRQAPGKGLEWVSSIDDIGRRTYYADSVKGRFTISRDNSKNTLYLQMNSLRAEDTAVYYCAEGAQGVLLFDYWGQGTLVTVSS

SEQ ID NO: 55 - protein, 117 aa, Artificial Sequence
  Description of Artificial Sequence: Synthetic polypeptide
EVQLLESGGGLVQPGGSLRLSCAASGFTFEDYRMVWVRQAPGKGLEWVSSISTSGELTYYADSVKGRFTISRDNSKNTLYLQMNSLRAEDTAVYYCAETAGQFFDYWGQGTLVTVSS

SEQ ID NO: 56 - protein, 116 aa, Artificial Sequence
  Description of Artificial Sequence: Synthetic polypeptide
EVQLLESGGGLVQPGGSLRLSCAASGFTFPEYEMVWVRQAPGKGLEWVSAISREGRATYYADSVKGRFTISRDNSKNTLYLQMNNLRAEDTAVYYCAKEPVRFDYWGQGTLVTVSS

SEQ ID NO: 57 - protein, 116 aa, Artificial Sequence
  Description of Artificial Sequence: Synthetic polypeptide
EVQLLESGGGLVQPGGSLRLSCAASGFTFSTYEMLWVRQAPGKGLEWVSSISSSGNYTYYADSVKGRFTISRDNSKNTLYLQMNSLRAEDTAVYYCAKEPLMFDYWGQGTLVTVSS

SEQ ID NO: 58 - protein, 116 aa, Artificial Sequence
  Description of Artificial Sequence: Synthetic polypeptide
EVQLLESGGGLVQPGGSLRLSCAASGFTFDTEEMSWVRQAPGKGLEWVSAISPNGAFTFYADSVKGRFTISRDNSKNTLYLQMNSLRAEDTAVYYCAKEPILFDYWGQGTLVTVSS

SEQ ID NO: 59 - protein, 117 aa, Artificial Sequence
  Description of Artificial Sequence: Synthetic polypeptide
EVQLLESGGGLVQPGGSLRLSCAASGFTFGHYDMVWVRQAPGRGLEWVSTINGAGLNTYYADSVKGRFTISRDNSKNTLYLQMNSLRAEDTAVYYCAQSASRIFDYWGQGTLVTVSS

SEQ ID NO: 60 - protein, 117 aa, Artificial Sequence
  Description of Artificial Sequence: Synthetic polypeptide
EVQLLESGGGLVQPGGSLRLSCAASGFTFRSYEMAWVRQAPGKGLEWVSSISTLGTKTYYADSVKGRFTISRDNSKNTLYLQMNSLRAEDTAVYYCAQSSTHIFDYWGQGTLVTVSS

SEQ ID NO: 61 - protein, 117 aa, Artificial Sequence
  Description of Artificial Sequence: Synthetic polypeptide
EVQLLESGGGLVQPGGSLRLSCAASGFTFIRYEMAWVRQAPGKGLEWVSSISSSGWTTYYADSVKGRFTISRDNSKNTLYLQMNSLRAEDTAVYYCAKSDAHIFDYWGQGTLVTVSS

SEQ ID NO: 62 - protein, 117 aa, Artificial Sequence
  Description of Artificial Sequence: Synthetic polypeptide
EVQLLESGGGLVQPGGSLRLSCAASGFTFYAYEMAWVRQAPGKGLEWVSSISDDGTRTYYADSVKGRFTISRDNSKNTLYLQMNSLRAEDTAVYYCAKDLGQGFDYWGQGTLVTVSS

SEQ ID NO: 63 - protein, 119 aa, Artificial Sequence
  Description of Artificial Sequence: Synthetic polypeptide
EVQLLESGGGLVQPGGSLRLSCAASGFTFADHGMTWVRQAPGKGLEWVSGIGPSGEATYYADSVKGRFTISRDNSKNTLYLQMNSLRAEDTAVYYCAKDRIPNLVFDYWGQGTLVTVSS

SEQ ID NO: 64 - protein, 116 aa, Artificial Sequence
  Description of Artificial Sequence: Synthetic polypeptide
EVQLLESGGGLVQPGGSLRLSCAASGFTFESQDMSWVRQAPGKGLEWVSGISPNGWDTYYADSVKGRFTISRDNSKNTLYLQMNSLRAEDTAVYYCAKDRSDFDYWGQGTLVTVSS

SEQ ID NO: 65 - protein, 117 aa, Artificial Sequence
  Description of Artificial Sequence: Synthetic polypeptide
EVQLLESGGGLVQPGGSLRLSCAASGFTFGDYDMWWVRQAPGKGLEWVSRIRHPGGVTYYADSVKGRFTISRDNSKNTLYLQMNSLRAEDTAVYYCAKAVPKGFDYWGQGTLVTVSS

SEQ ID NO: 66 - protein, 119 aa, Artificial Sequence
  Description of Artificial Sequence: Synthetic polypeptide
EVQLLESGGGLVQPGGSLRLSCAASGFTFRVYWMTWVRQAPGKGLEWVSSIDPQGGMTYYADSVKGRFTISRDNSKNTLYLQMNSLRAEDTAVYYCAKARIPNLEFDYWGQGTLVTVSS

SEQ ID NO: 67 - protein, 119 aa, Artificial Sequence
  Description of Artificial Sequence: Synthetic polypeptide
EVQLLESGGGLVQPGESLRLSCAASGFTFSAYDMTWVRQAPGKGLEWVSRINPTGSYTYYADSVKGRFTISRDNSKNTLYLQMNSLRAEDTAVYYCAKAKIPNLVFDYWGQGTLVTVSS

SEQ ID NO: 68 - protein, 121 aa, Artificial Sequence
  Description of Artificial Sequence: Synthetic polypeptide
EVQLLESGGGLVQPGGSLRLSCAASGFTFADSEMMWVRQAPGKGLEWVSGIAHNGGHTYYADSVKGRFTISRDNSKNTLYLQMNSLRAEDTAVYYCAKAGHPQQTEAFDYWGQGTLVTVSS

SEQ ID NO: 69 - protein, 116 aa, Artificial Sequence
  Description of Artificial Sequence: Synthetic polypeptide
EMQLLESGGGLVQPGGSLRLSCAASGFTFATYDMYWVRQAPGKGLEWVSKISPNGWSTYYADSVKGRFTISRDNSKNTLYLQMNSLRAEDTAVYYCAKYQTHFDYWGQGTLVTVSS

SEQ ID NO: 70 - protein, 116 aa, Artificial Sequence
  Description of Artificial Sequence: Synthetic polypeptide
EVQLLESGGGLVQPGGSLRLSCAASGFTFSVYDMRWVRQAPGKGLEWVSTISSSGTYTYYADSVKGRFTISRDNSKNTLYLQMNSLRAEDTAVYYCAKYPKNFDYWGQGTLVTVSS

SEQ ID NO: 71 - protein, 117 aa, Artificial Sequence
  Description of Artificial Sequence: Synthetic polypeptide
EVQLLESGGGLVQPGGSLRLSCAASGFTFSHEDMTWVRQAPGKGLEWVSSISPNGWDTYYADSVKGRFTISRDNSKNTLYLQMNSLRAEDTAVYYCAKRTRSKFDYWGQGTLVTVSS

SEQ ID NO: 72 - protein, 120 aa, Artificial Sequence
  Description of Artificial Sequence: Synthetic polypeptide
EVQLLESGGGLVQPGGSLRLSCAASGFTFEKYIMGWARQAPGKGLEWVSTIDYWGQHTYYADSVKGRFTISRDNSKNTLYLQMNSLRAEDTAVYYCAKRSHLIPLQFDYWGQGTLVTVSS

SEQ ID NO: 73 - protein, 123 aa, Artificial Sequence
  Description of Artificial Sequence: Synthetic polypeptide
EVQLLESGGGLVQPGGSLRLSCAASGFTFSDYAMGWVRQAPGKGLEWVSTISYVGYYTYYADSVKGRFTISRDNSKNTLYLQMNSLRAEDTAVYYCAKKALRGEAFTERFDYWGQGTLVTVSS

SEQ ID NO: 74 - protein, 123 aa, Artificial Sequence
  Description of Artificial Sequence: Synthetic polypeptide
EVQLLESGGGLVQPGGSLRLSCAASGFTFGPYMMHWVRQAPGKGLEWVSTIEVNGNRTYYADSVKGRFTISRDNSKNTLYLQMNSLRAEDTAVYYCAKWVGSKTSSDKSFDYWGQGTLVTVSS

SEQ ID NO: 75 - protein, 120 aa, Artificial Sequence
  Description of Artificial Sequence: Synthetic polypeptide
EVQLLESGGGLVQPGGSLRLSCAASGFTFGTTEMAWVRQAPGKGLEWVSSIGSAGAWTYYADSVKGRFTISRDNSKNTLYLQMNSLRAEDTAVYYCAKIGGHPQGQFDYWGQGTLVTVSS

SEQ ID NO: 76 - protein, 119 aa, Artificial Sequence
  Description of Artificial Sequence: Synthetic polypeptide
EVQLLESGGGLVQPGGSLRLSCAASGFTFPREWMAWVRQAPGKGLEWVSSIQPMGQTTYYADSVKGRFTISRDNSKNTLYLQMNSLRAEDTAVYYCAKYSRNKGFFDYWGQGTLVTVSS

SEQ ID NO: 77 - protein, 119 aa, Artificial Sequence
  Description of Artificial Sequence: Synthetic polypeptide
EVQLLESGGGLVQPGGSLRLSCAASGFTFTSEYMGWVRQAPGKGLEWVSSIQRYGSTTYYADSVKGRFTISRDNSKNTLYLQMNSLRAEDTAVYYCAKHESNWETFDYWGQGTLVTVSS

SEQ ID NO: 78 - protein, 123 aa, Artificial Sequence
  Description of Artificial Sequence: Synthetic polypeptide
EVQLLESGGGLVQPGGSLRLSCAASGFTFSVYSMQWVRQAPGKGLEWVSAITPNGTRTYYADSVKGRFTISRDNSKNTLYLQMNSLRAEDTAVYYCAKTLGRGSYPGVDFDYWGQGTLVTVSS

SEQ ID NO: 79 - protein, 119 aa, Artificial Sequence
  Description of Artificial Sequence: Synthetic polypeptide
EVQLLESGGGLVQPGGSLRLSCAASGFTFPSYAMTWVRQAPGKGLEWVSRITADGTVTYYADSVKGRFTISRDNSKNTLYLQMNSLRAEDTAVYYCAKGSIPMLTFDYWGQGTLVTVSS

SEQ ID NO: 80 - protein, 120 aa, Artificial Sequence
  Description of Artificial Sequence: Synthetic polypeptide
EVQLLESGGGLVQPGGSLRLSCAASGFTFSTYDMIWVRQAPGKGLEWVSAISPNGTGIYYADSVKGRFTISRDNSKNTLYLQMNSLRAEDTAVYYCAKNQSVHHAVFDYWGQGTLVTVSS

SEQ ID NO: 81 - protein, 119 aa, Artificial Sequence
  Description of Artificial Sequence: Synthetic polypeptide
EVQLLESGGGLVQPGGSLRLSCAASGFTFENYEMTWVRQAPGKGLEWVSRIAPHGRLTYYADSVKGRFTISRDNSKNTLYLQMNSLRAEDTAVYYCAKGQIPMLDFDYWGQGTLVTVSS

SEQ ID NO: 82 - protein, 121 aa, Artificial Sequence
  Description of Artificial Sequence: Synthetic polypeptide
EVQLLESGGGLVQPGGSLRLSCAASGFTFSHYMMMWVRQAPGKGLEWVSTISHFGDITYYADSVKGRFTISRDNSKNTLYLQMNSLRAEDTAVYYCAKNDMVMKNGGFDYWGQGTLVTVSS

SEQ ID NO: 83 - protein, 119 aa, Artificial Sequence
  Description of Artificial Sequence: Synthetic polypeptide
EVQLLESGGGLVQPGGSLRLSCAASGFTFERYDMSWVRQAPGKGLEWVSRIDSRGWSTYYADSVKGRFTISRDNSKNTLYLQMNSLRAEDTAVYYCAKGLVPHLRFDYWGQGTLVTVSS

SEQ ID NO: 84 - protein, 117 aa, Artificial Sequence
  Description of Artificial Sequence: Synthetic polypeptide
EVQLLESGGGLVQPGGSLRLSCAASGFTFANAQMTWVRQAPGKGLEWVSRIDAMGDATYYADSVKGRFTISRDNSKNTLYLQMNSLRAEDTAVYYCAKGKVPSIDYWGQGTLVTVSS

SEQ ID NO: 85 - protein, 117 aa, Artificial Sequence
  Description of Artificial Sequence: Synthetic polypeptide
EVQLLESGGGLVQPGGSLRLSCAASGFTFANAQMTWVRQAPGKGLEWVSRIDAMGDATYYADSVKGRFTISRDNSKNTLYLQMNSLRAEDTAVYYCAKGVIPAFDYWGQGTLVTVSS

SEQ ID NO: 86 - protein, 118 aa, Artificial Sequence
  Description of Artificial Sequence: Synthetic polypeptide
EVQLLESGGGLVQPGGSLRLSCAASGFTFQNDRMHWVRQAPGKGLEWVSSISATGGDTYYADSVKGRFTISRDNSKNTLYLQMNSLRAEDTAVYYCAKQTGTNRFDYWGQGTLVTVSS

SEQ ID NO: 87 - protein, 119 aa, Artificial Sequence
  Description of Artificial Sequence: Synthetic polypeptide
EVQLLESGGGLVQPGGSLRLSCAASGFTFNQPYMSWVRQAPGKGLEWVSSIDASGGTTYYADSVKGRFTISRDNSKNTLYLQMNSLRAEDAAVYYCAKDRIPNLVFDYWGQGTLVTVSS

SEQ ID NO: 88 - protein, 119 aa, Artificial Sequence
  Description of Artificial Sequence: Synthetic polypeptide
EVQLLESGGGLVQPGGSLRLSCAASGFTFDNENMTWVRQAPGKGLEWVSRIDGGGYNTYYADSVKGRFTISRDNSKNTLYLQMNSLRAEDTAVYYCAKGQVPELLFDYWGQGTLVTVSS

SEQ ID NO: 89 - protein, 119 aa, Artificial Sequence
  Description of Artificial Sequence: Synthetic polypeptide
EVQLLESGGGLVQPGGSLRLSCAASGFTFVSSNMTWVRQAPGKGLEWVSAISGSGGSTYYADSVKGRFTISRDNSKNTLYLQMNSLRAEDTAVYYCAKGRIPTLVFDYWGQGTLVTVSS

SEQ ID NO: 90 - protein, 119 aa, Artificial Sequence
  Description of Artificial Sequence: Synthetic polypeptide
EVQLLESGGGLVQPGGSLRLSCAASGFTFVSSNMTWVRQAPGKGLEWVSAISGSGGSTYYADSVKGRFTISRDNSKNTLYLQMNSLRAEDTAVYYCAKDRIPNLVFDYWGQGTLVTVSS

SEQ ID NO: 91 - protein, 119 aa, Artificial Sequence
  Description of Artificial Sequence: Synthetic polypeptide
EVQLLESGGGLVQPGGSLRLSCAASGFTFSDDSMSWVRQAPGKGLEWVSRINDAGSSTYYADSVKGRFTISRDNSKNTLYLQMNSLRAEDTAVYYCAKGTIPLLEFDYWGQGTLVTVSS

SEQ ID NO: 92 - protein, 119 aa, Artificial Sequence
  Description of Artificial Sequence: Synthetic polypeptide
EMQLLESGGGLVQPGGSLRLSCAASGFTFVSDTMSWVRQAPGKGLEWVSRIDGTGGDTYYADSVKGRFTISRDNSKNTLYLQMNSLRAGDTAVYYCAKGLIPDLQFDYWGQGTLVTVSS

SEQ ID NO: 93 - protein, 119 aa, Artificial Sequence
  Description of Artificial Sequence: Synthetic polypeptide
EVQLLESGGGLVQPGGSLRLSCAASGFTFDEEEMTWVRQAPGKGLEWVSRIIGGGHETYYADSVKGRFTISRDNSKNTLYLQMNSLRAEDTAVYYCAKGTIPLLEFDYWGQGTLVTVSS

SEQ ID NO: 94 - protein, 119 aa, Artificial Sequence
  Description of Artificial Sequence: Synthetic polypeptide
EVQLLESGGGLVQPGGSLRLSCAASGFTFDNENMTWVRQAPGKDLEWVSRITERGDVTYYADSVKGRFTISRDNSKNTLYLQMNSLRAEDTAVYYCAKGTVPTLEFDYWGQGTLVTVSS

SEQ ID NO: 95 - protein, 119 aa, Artificial Sequence
  Description of Artificial Sequence: Synthetic polypeptide
EVQLLESGGGLVQPGGSLRLSCAASGFTFDEEEMTWVRQAPGKGLEWVSRIIGGGHETYYADSVKGRFTISRDNSKNTLYLQMNSLRAEDTAVYYCAKGTVPTLEFDYWGQGTLVTVSS

SEQ ID NO: 96 - protein, 119 aa, Artificial Sequence
  Description of Artificial Sequence: Synthetic polypeptide
EVQLLESGGGLVQPGGSLRLSCAASGFTFHETEMTWVRQAPGKGLEWVSAINRLGQDTYYADSVKGRFTISRDNSKNTLYLQMNSLRAEDTAVYYCAKGRIPGLVFDYWGQGTLVTVSS

SEQ ID NO: 97 - protein, 119 aa, Artificial Sequence
  Description of Artificial Sequence: Synthetic polypeptide
EVQLLESGGGLVQPGGSLRLSCAASGFTFSDDSMSWVRQAPGKGLEWVSRINDAGSSTYYADSVKGRFTISRDNSKNTLYLQMNSLRAEDTAVYYCAKGTVPTLEFDYWGQGTLVTVSS

SEQ ID NO: 98 - protein, 119 aa, Artificial Sequence
  Description of Artificial Sequence: Synthetic polypeptide
EVQLLESGGGLVQPGGSLRLSCAASGFTFDNENMTWVRQAPGKDLEWVSRITERGDVTYYADSVKGRFTISRDNSKNTLYLQMNSLRAEDTAVYYCAKGRIPTLVFDYWGQGTLVTVSS

SEQ ID NO: 99 - protein, 119 aa, Artificial Sequence
  Description of Artificial Sequence: Synthetic polypeptide
EVQLLESGGGLVQPGGSLRLSCAASGFTFSDDSMSWVRQAPGKGLEWVSRINDAGSSTYYADSVKGRFTISRDNSKNTLYLQMNSLRAEDTAVYYCAKGITPNLTFDYWGQGTLVTVSS

SEQ ID NO: 100 - protein, 119 aa, Artificial Sequence
  Description of Artificial Sequence: Synthetic polypeptide
EVQLLESGGGLVQPGGSLRLSCAASGFTFADEPMTWVRQAPGKGLEWVSRIPPEGAPTYYADSVKGRFTISRDNSKNTLYLQMNSLRAEDTAVYYCAKGLIPDLQFDYWGQGTLVTVSS

SEQ ID NO: 101 - protein, 119 aa, Artificial Sequence
  Description of Artificial Sequence: Synthetic polypeptide
EVQLLESGGGLVQPGGSLRLSCAASGFTFQDSDMTWVRQAPGKGLEWVSAIAAPGGSTYYADSVKGRFTISRDNSKNTLYLQMNSLRAEDTAVYYCAKDRIPNLRFDYWGQGTLVTVSS

SEQ ID NO: 102 - protein, 119 aa, Artificial Sequence
  Description of Artificial Sequence: Synthetic polypeptide
EVQLLESGGGLVQPGGSLRLSCAASGFTFVSDTMSWVRQAPGKGLEWVSRIDGTGGDTYYADSVKGRFTISRDNSKNTLYLQMNSLRAEDTAVYYCAKGQVPELLFDYWGQGTLVTVSS

SEQ ID NO: 103 - protein, 119 aa, Artificial Sequence
  Description of Artificial Sequence: Synthetic polypeptide
EVQLLESGGGLVQPGGSLRLSCAASGFTFQDSDMTWVRQAPGKGLEWVSAIAAPGGSTYYADSVKGRFTISRDNSKNTLYLQMNSLRAEDTAVYYCAKDRIPNLVFDYWGQGTLVTVSS

SEQ ID NO: 104 - protein, 119 aa, Artificial Sequence
  Description of Artificial Sequence: Synthetic polypeptide
EVQLLESGGGLVQPGGSLRLSCAAAGFTFDLAEMTWVRQAPGKGLEWVSRIDEDGASTYYADSVKGRFTISRDNSKNTLYLQMNSLRAEDAAVYYCAEGVIPSLTFDYWGQGTLVTVSS

SEQ ID NO: 105 - protein, 119 aa, Artificial Sequence
  Description of Artificial Sequence: Synthetic polypeptide
EVQLLESGGGLVQPGGSLRLSCAASGFTFTDKHMSWVRQAPGKGLEWVSRISPDGTYTYYADSVKGRFTISRDNSKNTLYLQMNSLRAEDAAVYYCAEGVIPSLTFDYWGQGTLVTVSS

SEQ ID NO: 106 - protein, 119 aa, Artificial Sequence
  Description of Artificial Sequence: Synthetic polypeptide
EVQLLESGGGLVQPGGSLRLSCAASGFTFAEDDMTWVRQAPGKGLEWVSRIAVDGDRTYYADSVKGRFTISRDNSKNTLYLQMNSLRTEDTAVYYCAKGKTPHLVFDYWGQGTLVTVSS

SEQ ID NO: 107 - protein, 119 aa, Artificial Sequence
  Description of Artificial Sequence: Synthetic polypeptide
EVQLLESGGGLVQPGGSLRLSCAAAGFTFDLAEMTWVRQAPGKGLEWVSRIDEDGASTYYADSVKGRFTISRDNSKNTLYLQMNSLRAEDTAVYYCAKGQVPALVFDYWGQGTLVTVSS

SEQ ID NO: 108 - protein, 119 aa, Artificial Sequence
  Description of Artificial Sequence: Synthetic polypeptide
EVQLLESGGGLVQPGGSLRLSCAASGFTFEDSMMSWVRQAPGKGLEWVSRIDPGGAQTYYADSVKGRFTISRDNSKNTLYLQMNSLRAEDTAVYYCAKGVTPDLTFDYWGQGTLVTVSS

SEQ ID NO: 109 - protein, 119 aa, Artificial Sequence
  Description of Artificial Sequence: Synthetic polypeptide
EVQLLESGGGLVQPGGSLRLSCAASGFTFEHADMSWVRQASGKGLEWVSRIDNSGQSTYYADSVKGRFTISRDNSKNTLYLQMNSLRAEDTAVYYCAKGVTPDLTFDYWGQGTLVTVSS

SEQ ID NO: 110 - protein, 119 aa, Artificial Sequence
  Description of Artificial Sequence: Synthetic polypeptide
EVQLLESGGGLVQPGGSLRLSCAASGFTFSEAEMNWVRQAPGKGLEWVSRITTDGDSTYYADSVKGRFTISRDNSKNTLYLQMNSLRAEDTAVYYCAKGRIPTLHFDYWGQGTLVTVSS

SEQ ID NO: 111 - protein, 119 aa, Artificial Sequence
  Description of Artificial Sequence: Synthetic polypeptide
EVQLLESGGGLVQPGGSLRLSCAASGFTFDDSDMTWVRQAPGKSLEWVSYIRGDDDETYYADSVKGRFTISRDNSKNTLYLQMNSLRAEDTAVYYCAKNRIPDLVFDYWGQGTLVTVSS

SEQ ID NO: 112 - protein, 121 aa, Artificial Sequence
  Description of Artificial Sequence: Synthetic polypeptide
EVQLLESGGGLVQPGGSLRLSCAASGFTFNVADMQWVRQAPGKGLEWVSSISPNGWDTYYADSVKGRFTISRDNSKNTLYLQMNSLRAEDTAVYYCAKHASTEGPTAFDYWGQGTLVTVSS

SEQ ID NO: 113 - protein, 116 aa, Artificial Sequence
  Description of Artificial Sequence: Synthetic polypeptide
EVQLLESGGGLVQPGGSLRLSCAASGFTFGPYDMGWVRQAPGKGLEWVSWISAHGSFTYYADSVKGRFTISRDNSKNTLYLQMNSLRAEDTAVYYCAKWPYKFDYWGQGTLVTVSS

SEQ ID NO: 114 - protein, 119 aa, Artificial Sequence
  Description of Artificial Sequence: Synthetic polypeptide
EVQLLESGGGLVQPGGSLRLSCAASGFTFGSGSMSWVRQAPGKGLEWVSRIGSNGADTYYADSVKGRFTISRDNSKNTLYLQMNSLRAEDTAVYYCAKGMVPNLVFDYWGQGTLVTVSS

SEQ ID NO: 115 - protein, 119 aa, Artificial Sequence
  Description of Artificial Sequence: Synthetic polypeptide
EVQLLESGGGLVQPGGSLRLSCAASGFTFNRFDMTWVRQAPGKGLEWVSAISGSGGSTYYADSVKGRFTISRDNSKNTLYLQMNSLRAEDTAVYYCAKDRIPNLVFDYWGQGTLVTVSS

SEQ ID NO: 116 - protein, 119 aa, Artificial Sequence
  Description of Artificial Sequence: Synthetic polypeptide
EVQLLESGGGLVQPGGSLRLSCAASGFTFGESDMKWVRQAPGKGLEWVSSISPNGWDTYYADSVKGRFTISRDNSKNTLYLQMNSLRAEDTAVYYCAKSPSSRLKFDYWGQGTLVTVSS

SEQ ID NO: 117 - protein, 119 aa, Artificial Sequence
  Description of Artificial Sequence: Synthetic polypeptide
EVQLLESGGGLVQPGGSLRLSCAASGFTFDSSEMSWVRQAPGKGLEWVSSIENQGGATYYADSVKGRFTISRDNSKNTLYLQMNSLRAEDTAVYYCAKDRIPNLVFDYWGQGTLVTVSS

SEQ ID NO: 118 - protein, 116 aa, Artificial Sequence
  Description of Artificial Sequence: Synthetic polypeptide
EVQLLESGGGLVQPGGSLRLSCAASGFTLDAYPMYWVRQAPGKGLEWVSWIASGGGATYYADSVKGRFTISRDNSKNTLYLQMNSLRAEDTAVYYCAKRTKNFDYWGQGTLVTVSS

SEQ ID NO: 119 - protein, 120 aa, Artificial Sequence
  Description of Artificial Sequence: Synthetic polypeptide
EVQLLESGGGLVQPGGSLRLSCAASGFTFMSYSMAWVRQAPGKGLEWVSGITSNGNRTYYADSVKGRFTISRDNSKNTLYLQMNSLRAEDTAVYYCAKSTGANSRNFDYWGQGTLVTVSS

SEQ ID NO: 120 - protein, 121 aa, Artificial Sequence
  Description of Artificial Sequence: Synthetic polypeptide
EVQLLESGGGLVQPGGSLRLSCAASGFTFEGYLMSWVRQAPGKGLEWVSSIAANGMQTYYADSVKGRFTISRDNSKNTLYLQMNSLRAEDTAVYYCAKKPRGIWDGDFDYWGQGTLVTVSS

SEQ ID NO: 121 - protein, 119 aa, Artificial Sequence
  Description of Artificial Sequence: Synthetic polypeptide
EVQLLESGGGLVQPGGSLRLSCAASGFTFHESTMTWVRQAPGKGLEWVSTIRHPGEFTYYADSVKGRFTISRDNSKNTLYLQMNSLRAGDTAVYYCAKGLIPDLQFDYWGQGTLVTVSS

SEQ ID NO: 122 - protein, 121 aa, Artificial Sequence
  Description of Artificial Sequence: Synthetic polypeptide
EVQLLESGGGLVQPGGSLRLSCAASGFTFAMYSMSWVRQAPGKGLEWVSSIAPPGGRTYYADSVKGRFTISRDNSKNTLYLQMNSLRAEDTAVYYCAKQSLTGYSRSFDYWGQGTLVTVSS

SEQ ID NO: 123 - protein, 120 aa, Artificial Sequence
  Description of Artificial Sequence: Synthetic polypeptide
EVQLLESGGGLVQPGGSLRLSCAASGFTFSQNPMSWVRHAPGKGLEWVSTIPANGRPTSYADSVKGRFTISRDNSKNTLYLQMNSLRAEDTAVYYCAKYSQQPGRRFDYWGQGTLVTVSS

SEQ ID NO: 124 - protein, 119 aa, Artificial Sequence
  Description of Artificial Sequence: Synthetic polypeptide
EVQLLESGGGLVQPGGSLRLSCAASGFTFANYHMTWVRQAPGKGLEWVSSIPDSGKQTYYADSVKGRFTISRDNSKNTLYLQMNSLRAEDTAVYYCAKGRIPSLLFDYWGQGTLVTVSS

SEQ ID NO: 125 - protein, 120 aa, Artificial Sequence
  Description of Artificial Sequence: Synthetic polypeptide
EVQLLESGGGLVQPGGSLRLSCAASGFTFAQYHMRWVRQAPGKGLEWVSTINDIGSNTYYADSVKGRFTISRDNSKNTLYLQMNSLRAEDTAVYYCAKVGGRGSFSFDYWGQGTLVTVSS

SEQ ID NO: 126 - protein, 120 aa, Artificial Sequence
  Description of Artificial Sequence: Synthetic polypeptide
EVQLLESGGGLVQPGGSLRLSCAASGFTFSSYDMKWVRQAPGKGLEWVSTISASGVFTYYADSVKGRFTISRDNSKNTLYLQMNSLRAEDTAVYYCAKREHAGQPPFDYWGQGTLVTVSS

SEQ ID NO: 127 - protein, 120 aa, Artificial Sequence
  Description of Artificial Sequence: Synthetic polypeptide
EVQLLESGGGLVQPGGSLRLSCAASGFTFNGYAMSWVRQAPGKGLEWVSTINANGKYTYYADSVKGRFTISRDNSKNTLYLQMNSLRAEDTAVYYCAKKLTLASNYFDYWGQGTLVTVSS

SEQ ID NO: 128 - protein, 121 aa, Artificial Sequence
  Description of Artificial Sequence: Synthetic polypeptide
EVQLLESGGGLVQPGGSLRLSCAASGFTFMDYDMKWVRQAPGKGLEWVSSITALGKKTYYADSVKGRFTISRDNSKNTLYLQMNSLRAEDTAVYYCAKDSVKYPLNLFDYWGQGTLVTVSS

SEQ ID NO: 129 - protein, 120 aa, Artificial Sequence
  Description of Artificial Sequence: Synthetic polypeptide
EVQLLESGGGLVQPGGSLRLSCAASGFTFPHYTMAWVRQAPGKGLEWVSSIQSPGWRTYYADSVKGRFTISRDNSKNTLYLQMNSLRAEDTAVYYCAKYGDGLPLTFDYWGQGTLVTVSS

SEQ ID NO: 130 - protein, 119 aa, Artificial Sequence
  Description of Artificial Sequence: Synthetic polypeptide
EVQLLESGGGLVQPGGSLRLSCAASGFTFSGTPMSWVRQAPGKGLEWVSRIGDEGQETYYADSVKGRFTISRDNSKNTLYLQMNSLRAEDTAVYYCAKGVTPDLTFDYWGQGTLVTVSS

SEQ ID NO: 131 - protein, 119 aa, Artificial Sequence
  Description of Artificial Sequence: Synthetic polypeptide
EVQLLESGGGLVQPGGSLRLSCAASGFTFSSSSMSWVRQAPGKGLEWVSAIGSDGPSTYYADSVKGRFTISRDNSKNTLYLQMNSLRAEDTAVYYCAKGRIPTLHFDYWGQGTLVTVSS

SEQ ID NO: 132 - protein, 119 aa, Artificial Sequence
  Description of Artificial Sequence: Synthetic polypeptide
EVQLLESGGGLVQPGGSLRLSCAASGFTFNPGEMTWVRQAPGKGLEWVSSIDGSGSSTYYADSVKGRFTISRDNSKNTLYLQMNSLRADDTAVYYCAKGRIPTLHFDYWGQGTLVTVSS

SEQ ID NO: 133 - protein, 119 aa, Artificial Sequence
  Description of Artificial Sequence: Synthetic polypeptide
EVQLLESGGGLVQPGGSLRLSCAASGFTFPESMMGWVRQAPGKGLEWVSSIGYPGATTYYADSVKGRFTISRDNSKNTLYLQMNSLRAEDTAVYYCAKGGSRDDNFDYWGQGTLVTVSS

SEQ ID NO: 134 - protein, 124 aa, Artificial Sequence
  Description of Artificial Sequence: Synthetic polypeptide
EVQLLESGGGLVQPGGSLRLSCAASGFTFGQHSMHWVRQAPGKGLEWVSSISVPGPKTYYADSVKGRFTISRDNSKNTLYLQMNSLRAEDTAVYYCAKSLRDLRPGDSKSFDYWGQGTLVTVSS

SEQ ID NO: 135 - protein, 116 aa, Artificial Sequence
  Description of Artificial Sequence: Synthetic polypeptide
EVQLLESGGGLVQPGGSLRLSCAASGFTFGSAAMDWVRQAPGKGLEWVSSINDMGSNTYYADSVKGRFTISRDNSKNTLYLQMNSLRAEDTAVYYCAKQGGRFDYWGQGTLVTVSS

SEQ ID NO: 136 - protein, 118 aa, Artificial Sequence
  Description of Artificial Sequence: Synthetic polypeptide
EVQLLESGGGLVQPGGSLRLSCAASGFTFGYDRMAWVRQAPGKGLEWVSSIDGPGGATYYADSVKGRFTISRDNSKNTLYLQMNSLRAEDTAVYYCAEGRRVPDFDYWGQGTLVTVSS

SEQ ID NO: 137 - protein, 119 aa, Artificial Sequence
  Description of Artificial Sequence: Synthetic polypeptide
EVQLLESGGGLVQPGGSLRLSCAASGFTFGEYEMTWVRQAPGKGLEWVSRIDPFGSETYYADSVKGRFTISRDNSKNTLYLQMNSLRAEDTAVYYCAEGVVPDLNFDYWGQGTLVTVSS

SEQ ID NO: 138 - protein, 120 aa, Artificial Sequence
  Description of Artificial Sequence: Synthetic polypeptide
EVQLLESGGGLVQPGGSLRLSCAASGFTFDKYVMGWVRQAPGKGLEWVSTIGSYGGATYYADSVKGRFTISRDNSKNTLYLQMNSLRAEDTAVYYCAKRLTLSATKFDYWGQGTLVTVSS

SEQ ID NO: 139 - protein, 120 aa, Artificial Sequence
  Description of Artificial Sequence: Synthetic polypeptide
EVQLLESGGGLVQPGGSLRLSCAASGFTFEDYVMGWVRQAPGKGLEWVSTIAHRGDITYYADSVKGRFTISRDNSKNTLYLQMNSLRAEDTAVYYCAKRRRLSDYRFDYWGQGTLVTVSS

SEQ ID NO: 140 - protein, 119 aa, Artificial Sequence
  Description of Artificial Sequence: Synthetic polypeptide
EVQLLESGGGLVQPGGSLRLSCAASGFTFGQFDMYWVRQAPGKGLEWVSAISPAGTGTYYADSVKGRFTISRDNSKNTLYLQMNSLRAEDTAVYYCAKAGDRSSLFDYRGQGTLVTVSS

SEQ ID NO: 141 - protein, 118 aa, Artificial Sequence
  Description of Artificial Sequence: Synthetic polypeptide
EVQLLESGGGLVQPGGSLRLSCAASGFTFKDTGMTWVRQAPGKGLEWVSSISSYGRDTYYADSVKGRFTISRDNSKNTLYLQMNSLRAEDAAVYYCAKLNAALGFDYWGQGTLVTVSS

SEQ ID NO: 142 - protein, 118 aa, Artificial Sequence
  Description of Artificial Sequence: Synthetic polypeptide
EVQLLESGGGLVQPGGSLRLSCAASGFTFGPYPMSWVRQAPGKGLEWVSGINAPGTRTYYADSVKGRFTISRDNSKNTLYLQMNSLRAEDTAVYYCAQQMSSGVFDYWGQGTLVTVSS

SEQ ID NO: 143 - protein, 118 aa, Artificial Sequence
  Description of Artificial Sequence: Synthetic polypeptide
EVQLLESGGGLVQPGGSLRLSCAASGFTFSNQDMTWVRQAPGKGLEWVSSIDSSGQLTYYADSVKGRFTISRDNSKNTLYLQMNSLRAEDTAVYYCAKVKSLARFDYWGQGTLVTVSS

SEQ ID NO: 144 - protein, 117 aa, Artificial Sequence
  Description of Artificial Sequence: Synthetic polypeptide
EVQLLESGGGLVQPGGSLRLSCAASGFTFPESDMKWVRQAPGKGLEWVSSISPNGWDTYYADSVKGRFTISRDNSKNTLYLQMNSLRAEDTAVYYCAKPAQVLFDYWGQGTLVTVSS

SEQ ID NO: 145 - protein, 120 aa, Artificial Sequence
  Description of Artificial Sequence: Synthetic polypeptide
EVQLLESGGGLVQPGGSLRLSCAASGFTFEQYVMGWVRQAPGKGLEWVSTIGTSGKYTYYADSVKGRFTISRDNSKNTLYLQMNSLRAEDTAVYYCAQRRSLTRVHFDYWGQGTLVTVSS

SEQ ID NO: 146 - protein, 119 aa, Artificial Sequence
  Description of Artificial Sequence: Synthetic polypeptide
EVQLLESGGGLVQPGGSLRLSCAASGFTFGVEHMSWVRQAPGKGLEWVSAITGDGDRTYYADSVKGRFTISRDNSKNTLYLQMNSLRAEDTAVYYCAKTVSWNGRFDYWGQGTLVTVSS

SEQ ID NO: 147 - protein, 117 aa, Artificial Sequence
  Description of Artificial Sequence: Synthetic polypeptide
EVQLLESGGGLVQPGGSLRLSCAASGFTFAWYNMGWVRQAPGKGLEWVSRIAPSGIITYYADSVKGRFTISRDNSKNTLYLQMNSLRAEDTAVYYCAKGLRGKFDYWGQGTLVTVSS

SEQ ID NO: 148 - protein, 116 aa, Artificial Sequence
  Description of Artificial Sequence: Synthetic polypeptide
EVQLLESGGGLVQPGGSLRLSCAASGFTFSNYEMRWVRQAPGKGLEWVSSISSAGTDTYYADSVKGRFTISRDNSKNTLYLQMNSLRAEDTAVYYCAKQSLNFDYWGQGTLVTVSS

SEQ ID NO: 149 - protein, 116 aa, Artificial Sequence
  Description of Artificial Sequence: Synthetic polypeptide
EVQLLESGGGLVQPGGSLRLSCVASGFTFDEEPMTWVRQAPGKGLEWVSIIDPGGGATYYADSVKGRFTISRDNSKNTLYLQMNSLRAEDTAVYYCAKSNSMFDYWGQGTLVTVSS

SEQ ID NO: 150 - protein, 121 aa, Artificial Sequence
  Description of Artificial Sequence: Synthetic polypeptide
EVQLLESGGGLVQPGGSLRLSCAASGFTFSAYPMHWVRQAPGKGLEWVSSIASSGITTYYADSVKGRFTISRDNSKNTLYLQMNSLRAEDTAVYYCAKFTRLHFPAQFDYWGQGTLVTVSS

SEQ ID NO: 151 - protein, 119 aa, Artificial Sequence
  Description of Artificial Sequence: Synthetic polypeptide
EVQLLESGGGLVQPGGSLRLSCAASGFTFADYAMGWVRQAPGKGLEWVSRISPEGSRTYYADSVKGRFTISRDNSKNTLYLQMNSLRAEDTAVYYCAKLRPYASKFDYWGQGTLVTVSS

SEQ ID NO: 152 - protein, 116 aa, Artificial Sequence
  Description of Artificial Sequence: Synthetic polypeptide
EVQLLESGGGLVQPGGSLRLSCAASGFTFRPYDMGWVRQAPGKGLEWVSTISHQGNRTYYADSVKGRFTISRDNSKNTLYLQMNSLRAEDTAVYYCAKVSHHFDYWGQGTLVTVSS

SEQ ID NO: 153 - protein, 118 aa, Artificial Sequence
  Description of Artificial Sequence: Synthetic polypeptide
EVQLLESGGGLVQPGGSLRLSCAASGFTFSAYNMWWARQAPGKGLEWVSWINSTGSRTYYADSVKGRFTISRDNSKNTLYLQMNSLRAEDTAVYYCAKNWHRGRFDYWGQGTLVTVSS

SEQ ID NO: 154 - protein, 117 aa, Artificial Sequence
  Description of Artificial Sequence: Synthetic polypeptide
EVQLLESGGGLVQPGGSLRLSCAASGFTFDRYRMGWVRQAPGKGLEWVSTINRLGQSTYYADSVKGRFTISRDNSKNTLYLQMNSLRAEDTAVYYCAKVKKHKFDYWGQGTLVTVSS

SEQ ID NO: 155 - protein, 117 aa, Artificial Sequence
  Description of Artificial Sequence: Synthetic polypeptide
EVQLLESGGGLVQPGGSLRLSCAASGFTFAHYNMRWVRQAPGKGLEWVSTITKTGFRTYYADSVKGRFTISRDNSKNTLYLQMNSLRAEDTAVYYCAKAGQFDFDYWGQGTLVTVSS

SEQ ID NO: 156 - protein, 118 aa, Artificial Sequence
  Description of Artificial Sequence: Synthetic polypeptide
EVQLLESGGGLVQPGGSLRLSCAASGFTFYPYSMHWVRQAPGKGLEWVSTIDGSGMFTYYADSVKGRFTISRDNSKNTLYLQMNSLRAEDTAVYYCAEDSLKASFDYWGQGTLVTVSS

SEQ ID NO: 157 - protein, 117 aa, Artificial Sequence
  Description of Artificial Sequence: Synthetic polypeptide
EVQLLESGGGLVQPGGSLRLSCAASGFTFPLYGMWWVRQAPGKGLEWVSYIGPYGHTTYYADSVKGRFTISRDNSKNTLYLQMNSLRAEDTAVYYCAKKRKKKFDYWGQGTLVTVSS

SEQ ID NO: 158 - protein, 117 aa, Artificial Sequence
  Description of Artificial Sequence: Synthetic polypeptide
EVQLLESGGGLVQPGGSLRLSCAASGFTFPRYRMSWVRQAPGKGLEWVSSITPYGAHTYYADSVKGRFTISRDNSKNTLYLQMNSLRAEDTAVYYCAKYGKWYFDYWGQGTLVTVSS

SEQ ID NO: 159 - protein, 117 aa, Artificial Sequence
  Description of Artificial Sequence: Synthetic polypeptide
EVQLLESGGGLVQPGGSLRLSCAASGFTFNEYAMRWVRQAPGKGLEWVSTIDRLGLHTYYADSVKGRFTISRDNSKNTLYLQMNSLRAEDTAVYYCAKSGPFTFDYWGQGTLVTVSS

SEQ ID NO: 160 - protein, 117 aa, Artificial Sequence
  Description of Artificial Sequence: Synthetic polypeptide
EVQLLESGGGLVQPGGSLRLSCAASGFTFERYNMRWVRQAPGKGLEWVSTIDRLGLATYYADSVKGRFTISRDNSKNTLYLQMNSLRAEDTAVYYCAKAGSWSFDYWGQGTLVTVSS

SEQ ID NO: 161 - protein, 118 aa, Artificial Sequence
  Description of Artificial Sequence: Synthetic polypeptide
EVQLLESGGGLVQPGGSLRLSCAASGFTFGIYDMKWVRQAPGKGLEWVSTISSSGTHTYYADSVKGRFTISRDNSKNTLYLQMNSLRAEDTAVYYCAKYPQPYPFDYWGQGTLVTVSS

SEQ ID NO: 162 - protein, 118 aa, Artificial Sequence
  Description of Artificial Sequence: Synthetic polypeptide
EVQLLESGGGLVQPGGSLRLSCAASGFTFWVYDMRWVRQAPGKGLEWVSTISATGVHTYYADSVKGRFTISRDNSKNTLYLQMNSLRAEDTAVYYCAKYPPAGRFDYWGQGTLVTVSS

SEQ ID NO: 163 - protein, 119 aa, Artificial Sequence
  Description of Artificial Sequence: Synthetic polypeptide
EVQLLESGGGLVQPGGSLRLSCAASGFTFSTYDMIWVRQAPGKGLEWVSAISPNGTGTYYADSVKGRFTISRDNSKNTLYLQMNSLRAEDTAVYYCAKPPQVNTEFDYRGQGTLVTVSS

SEQ ID NO: 164 - protein, 116 aa, Artificial Sequence
  Description of Artificial Sequence: Synthetic polypeptide
EVQLLESGGGLVQPGGSLRLSCAASGFTFEKEDMGWVRQAPGKGLEWVSHISPNGYATYYADSVKGRFTISRDNSKNTLYLQMNSLRAEDTAVYYCAKSWSSFDYWGQGTLVTVSS

SEQ ID NO: 165 - protein, 118 aa, Artificial Sequence
  Description of Artificial Sequence: Synthetic polypeptide
EVQLLESGGGLVQPGGSLRLSCAASGFTFSATPMEWARQAPGKGLEWVSTISESGYSTYYADSVKGRFTISRDNSKNTLYLQMNSLRAEDTAVYYCAKWNSTTGFDYWGQGTLVTVSS

SEQ ID NO: 166 - protein, 117 aa, Artificial Sequence
  Description of Artificial Sequence: Synthetic polypeptide
EVQLLESGGGLVQPGGSLRLSCAASGFTFNTVDMEWVRQAPGKGLEWVSSISPNGWDTYYADSVKGRFTISRDNSKNTLYLQMNSLRAEDTAVYYCAEAPHRAFDYWGQGTLVTVSS

SEQ ID NO: 167 - protein, 119 aa, Artificial Sequence
  Description of Artificial Sequence: Synthetic polypeptide
EVQLLESGGGLVQPGGSLRLSCAASGFTFEDKEMSWVRQAPGKGLEWVSRIDALGDSTYYADSVKGRFTISRDNSKNTLYLQMNSLRAEDTAVYYCAEGMVPRLKFDYWGQGTLVTVSS

SEQ ID NO: 168 - protein, 114 aa, Artificial Sequence
  Description of Artificial Sequence: Synthetic polypeptide
EVQLLESGGGLVQPGGSLRLSCAASGFTFSDHSMMWVRQAPGKGLEWVSDIEPHGVHTYYADSVKGRFTISRDNSKNTLYLQMNSLRAEDTAVYYCANPTFDYWGQGTLVTVSS

SEQ ID NO: 169 - protein, 122 aa, Artificial Sequence
  Description of Artificial Sequence: Synthetic polypeptide
EVQLLESGGGLVQPGGSLRLSCAASGFTFSPHTMHWVRQAPGKGLEWVSGIGPDGTTTYYADSVKGRFTISRDNSKNTLYLQMNSLRAEDTAVYYCAKRSYSWDRGWTFDYWGQGTLVTVSS

SEQ ID NO: 170 - protein, 119 aa, Artificial Sequence
  Description of Artificial Sequence: Synthetic polypeptide
EVQLLESGGGLVQPGGSLRLSCAASGFTFYASDMKWVRQAPGKGLEWVSSISPNGWDTYYADSVKGRFTISRDNSKNTLYLQMNSLRAEDTAVYYCAKADYTYHSFDYWGQGTLVTVSS

SEQ ID NO: 171 - protein, 117 aa, Artificial Sequence; identical to SEQ ID NO: 155
  Description of Artificial Sequence: Synthetic polypeptide

SEQ ID NO: 172 - protein, 118 aa, Artificial Sequence
  Description of Artificial Sequence: Synthetic polypeptide
EVQLLESGGGLVQPGGSLRLSCAASGFTFSHYHMGWARQAPGKGLEWVSVIGPRGISTYYADSVKGRFTISRDNSKNTLYLQMNSLRAEDTAVYYCAKSPSRHRFDYWGQGTLVTVSS

SEQ ID NO: 173 - protein, 117 aa, Artificial Sequence; identical to SEQ ID NO: 159
  Description of Artificial Sequence: Synthetic polypeptide

SEQ ID NO: 174 - protein, 123 aa, Artificial Sequence
  Description of Artificial Sequence: Synthetic polypeptide
EVQLLESGGGLVQPGGSLRLSCAASGFTFGNYSMKWARQAPGKGLEWVSTITPDGWYTYYADSVKGRFTISRDNSKNTLYLQMNSLRAEDTAVYYCAKVGDAVWGWIGGFDYWGQGTLVTVSS

SEQ ID NO: 175 - protein, 116 aa, Artificial Sequence
  Description of Artificial Sequence: Synthetic polypeptide
EVQLLESGGGLVQPGGSLRLSCAASGFTFGDYGMKWVRQAPGKGLEWVSAITSNGDFTYYADSVKGRFTISRDNSKNTLYLQMNSLRAEDTAVYYCAKSLYKFDYWGQGTLVTVSS

SEQ ID NO: 176 - protein, 123 aa, Artificial Sequence
  Description of Artificial Sequence: Synthetic polypeptide
EVQLLESGGGLVQPGGSLRLSCAGSGFTFPTYKMGWVRQAPGKGLEWVSFIDYWGWRTYYADSVKGRFTISRDNSKNTLYLQMNSLRAEDTAVYYCAKSPYSWTHDSPHFDYWGQGTLVTVSS

SEQ ID NO: 177 - protein, 116 aa, Artificial Sequence
  Description of Artificial Sequence: Synthetic polypeptide
EVQLLESGGGLVQPGGSLRLSCAASGFTFRPYTMCWARQAPGKGLEWVSCISDAGSFTYYADSVKGRFTISRDNSKNTLYLQMNSLRAEDTAVYYCAKRMSSFDYWGQGTLVTVSS

SEQ ID NO: 178 - protein, 122 aa, Artificial Sequence
  Description of Artificial Sequence: Synthetic polypeptide
EVQLLESGGGLVQPGGSLRLSCAASGFTFQNYQMAWVRQAPGKGLEWVSTISGTGKNTYYADSVKGRFTISRDNSKNTLYLQMNSLRAEDTAVYYCAKTPQNYFSVRRFDYWGQGTLVTVSS

SEQ ID NO: 179 - protein, 118 aa, Artificial Sequence
  Description of Artificial Sequence: Synthetic polypeptide
EVQLLESGGGLVQPGGSLRLSCAASGFTFGAYTMGWVRQAPGKGLEWVSKISTSGGQTYYADSVKGRFTISRDNSKNTLYLQMNSLRAEDTAVYYCAKPLNWWAFDYWGQGTLVTVSS

SEQ ID NO: 180 - protein, 117 aa, Artificial Sequence
  Description of Artificial Sequence: Synthetic polypeptide
EVQLLESGGGLVQPGGSLRLSCAASGFTFNAYPMTWVRQAPGKGLEWVSRIDGYGRHTYYADSVKGRFTISRDNSKNTLYLQMNSLRAEDTAVYYCAKGIIPNFDYWGQGTLVTVSS

SEQ ID NO: 181 - protein, 119 aa, Artificial Sequence
  Description of Artificial Sequence: Synthetic polypeptide
EVQLLESGGGLVQPGGSLRLSCAASGFTFGAVDMTWVRQAPGKGLEWVSAISPSGSATYYADSVKGRFTISRDNSKNTLYLQMNSLRAEDTAVYYCAKGRVPDLGFDYWGQGTLVTVSS

SEQ ID NO: 182 - protein, 117 aa, Artificial Sequence
  Description of Artificial Sequence: Synthetic polypeptide
EVQLLESGGGLVQPGGSLRLSCAASGFTFDSYAMGWARQAPGKGLEWVSAIGAKGLSTYYADSVKGRFTISRDNSKNTLYLQMNSLRAEDTAVYYCAKAARGKFDYWGQGTLVTVSS

SEQ ID NO: 183 - protein, 116 aa, Artificial Sequence
  Description of Artificial Sequence: Synthetic polypeptide
EVQLLESGGGLVQPGGSLRLSCAASGFTFTRYQMGWVRQAPGKGLEWVSVINVWGSSTYYADSVKGRFTISRDNSKNTLYLQMNSLRAEDTAVYYCAKMSGKFAYWGQGTLVTVSS

SEQ ID NO: 184 - protein, 117 aa, Artificial Sequence
  Description of Artificial Sequence: Synthetic polypeptide
EVQLLESGGGLVQPGGSLRLSCAASGFTFGNYSMMWVRQAPGKGLEWVSTIIPAGTSTYYADSVKGRFTISRDNSKNTLYLQMNSLRAEDTAVYYCAKPSIRLFDYWGQGTLVTVSS

SEQ ID NO: 185 - protein, 116 aa, Artificial Sequence
  Description of Artificial Sequence: Synthetic polypeptide
EVQLLESGGGLVQPGGSLRLSCAASGFTFGAYDMGWVRQAPGKGLEWVSWISPNGYDTYYADSVKGRFTISRDNSKNTLYLQMNSLRAEDTAVYYCAKGGVKFDYWGQGTLVTVSS

SEQ ID NO: 186 - protein, 123 aa, Artificial Sequence
  Description of Artificial Sequence: Synthetic polypeptide
EVQLLESGGGLVQPGGSLRLSCAASGFTFVWYEMAWVRQAPGKGLEWVSTIQADGEQTYYADSVKGRFTISRDNSKNTLYLQMNSLRAEDTAVYYCAKASYALVYPPEEFDYWGQGTLVTVSS

SEQ ID NO: 187 - protein, 122 aa, Artificial Sequence
  Description of Artificial Sequence: Synthetic polypeptide
EVQLLESGGGLVQPGGSLRLSCAASGFTFTNYRMSWVRQAPGKGLEWVSAIDDLGVSTYYADSVKGRFTISRDNSKNTLYLQMNSLRAEDTAVYYCAKWRLKNSQPTDFDYWGQGTLVTVSS

SEQ ID NO: 188 - protein, 119 aa, Artificial Sequence
  Description of Artificial Sequence: Synthetic polypeptide
EVQLLESGGGLVQPGGSLRLSCAASGFTFDQAHMWWVRQAPGKGLEWVSFINPSGYYTYYADSVKGRFTISRDNSKNTLYLQMNSLRAEDTAVYYCAKPSLSPSSFDYWGQGTLVTVSS

SEQ ID NO: 189 - protein, 118 aa, Artificial Sequence
  Description of Artificial Sequence: Synthetic polypeptide
EVQLLESGGGLVQPGGSLRLSCAASGFTFETGQMGWARQAPGKGLEWVSNIDGSGTYTYYADSVKGRFTISRDNSKNTLYLQMNSLRAEDTAVYYCAKSTQNYRFDYWGQGTLVTVSS

SEQ ID NO: 190 - protein, 119 aa, Artificial Sequence
  Description of Artificial Sequence: Synthetic polypeptide
EVQLLESGGGLVQPGGSLRLSCAASGFTFGAYPMYWVRQAPGKGLEWVSSIHKDGRITYYADSVKGRFTISRDNSKNTLYLQMNSLRAEDTAVYYCAKQGTPVDGFDYWGQGTLVTVSS

SEQ ID NO: 191 - protein, 121 aa, Artificial Sequence
  Description of Artificial Sequence: Synthetic polypeptide
EVQLLESGGGLVQPGGSLRLSCAASGFTFPDEGMTWVRQAPGKGLEWVSTIETGGTVTYYADSVKGRFTISRDNSKNTLYLQMNSLRAEDTAVYYCAKMDGSGTWQTFDYWGQGTLVTVSS

SEQ ID NO: 192 - protein, 116 aa, Artificial Sequence
  Description of Artificial Sequence: Synthetic polypeptide
EVQLLESGGGLVQPGGSLRLSCAASGFTFDSLGMGWARQAPGKGLEWVSYIRAEGAYTYYADSVKGRFTISRDNSKNTLYLQMNSLRAEDTAVYYCAKYLADSDYWGQGTLVTVSS

SEQ ID NO: 193 - protein, 120 aa, Artificial Sequence
  Description of Artificial Sequence: Synthetic polypeptide
EVQLLESGGGLVQPGGSLRLSCAASGFTFSESYMEWVRQAPGKGLEWVSGIDHIGGGTYYADSVKGRFTISRDNSKNTLYLQMNSLRAEDTAVYYCAKDDGRGGSMFDYWGQGTLVTVSS

SEQ ID NO: 194 - protein, 116 aa, Artificial Sequence
  Description of Artificial Sequence: Synthetic polypeptide
EVQLLESGGGLVQPGGSLRLSCAASGFTFSGGYMWWVRQAPGKGLEWVSSIGASGAYTYYADSVKGRFTISRDNSKNTLYLQMNSLRAEDTAVYYCAKTGGRLDYWGQGTLVTVSS

SEQ ID NO: 195 - protein, 119 aa, Artificial Sequence
  Description of Artificial Sequence: Synthetic polypeptide
EVQLLESGGGLVQPGGSLRLSCAASGFTFDEGHMGWVRQAPGKDLEWVSYIGSLGLHTYYADSVKGRFTISRDNSKNTLYLQMNSLRAEDTAVYYCAKREFSNGGFDYWGQGTLVTVSS

SEQ ID NO: 196 - protein, 121 aa, Artificial Sequence
  Description of Artificial Sequence: Synthetic polypeptide
EVQLLESGGGLVQPGGSLRLSCAASGFTFKTSPMYWVRQAPGKGLEWVSSIDRTGGHTYYADSVKGRFTISRDNSKNTLYLQMNSLRAEDTAVYYCAKQALLTDAKRFDYWGQGTLVTVSS

SEQ ID NO: 197 - protein, 120 aa, Artificial Sequence
  Description of Artificial Sequence: Synthetic polypeptide
EVQLLESGGGLVQPGGSLRLSCAASGFTFDGRDMVWVRQAPGKGLEWVSAISPSGLDTYYADSVKGRFTISRDNSKNTLYLQMNSLRAEDTAVYYCAERPQMLVTNFDYWGQGTLVTVSS

SEQ ID NO: 198 - protein, 119 aa, Artificial Sequence
  Description of Artificial Sequence: Synthetic polypeptide
EVQLLESGGGLVQPGGSLRLSCAASGFTFGNDPMSWVRQAPGKGLEWVSGIGREGDSTYYADSVKGRFTISRDNSKNTLYLQMNSLRAEDTAVYYCAKDSMRHQPFDYWGQGTLVTVSS

SEQ ID NO: 199 - protein, 119 aa, Artificial Sequence
  Description of Artificial Sequence: Synthetic polypeptide
EVQLLESGGGLVQPGGSLRLSCAASGFTFDETYMKWVRQAPGKGLEWVSAIGASGADTYYADSVKGRFTISRDNSKNTLYLQMNSLRAEDTAVYYCAKFTHLNGRFDYWGQGTLVTVSS

SEQ ID NO: 200 - protein, 119 aa, Artificial Sequence
  Description of Artificial Sequence: Synthetic polypeptide
EVQLLESGGGLVQPGGSLRLSCAASGFTFGGWPMGWVRQAPGKGLEWVSGIDIDGAPTYYADSVKGRFTISRDNSKNTLYLQMNSLRAEDTAVYYCAKEEAGSWSFDYWGQGTLVTVSS

SEQ ID NO: 201 - protein, 116 aa, Artificial Sequence
  Description of Artificial Sequence: Synthetic polypeptide
EVQLLESGGGLVQPGGSLRLSCAASGFTFSDQAMWWARQAPGKGLEWVSFIQGDGGFTYYADSVKGRFTISRDNSKNTLYLQMNSLRAEDTAVYYCAKPSKPFDYWGQGTLVTVSS

SEQ ID NO: 202 - protein, 118 aa, Artificial Sequence
  Description of Artificial Sequence: Synthetic polypeptide
EVQLLESGGGLVQPGGSLRLSCAASGFTFETGQMGWARQAPGKGLEWVSNIDGSGTYTYYADSVKGRFTISRDNSKNTLYLQMNSLRAEDTAVYYCAKAVRNFAFDYWGQGTLVTVSS

SEQ ID NO: 203 - protein, 124 aa, Artificial Sequence
  Description of Artificial Sequence: Synthetic polypeptide
EVQLLESGGGLVQPGGSLRLSCAASGFTFSGHDMSWVRQAPGKGLEWVSAISPHGTHTYYADSVKGRFTISRDNSKNTLYLQMNSLRAEDTAVYYCAKGIRGWIGHDTQPFDYWGQGTLVTVSS

SEQ ID NO: 204 - protein, 119 aa, Artificial Sequence
  Description of Artificial Sequence: Synthetic polypeptide
EVQLLESGGGLVQPGGSLRLSCAASGFTFESKDMLWVRQAPGKGLEWVSSISSDGTHTYYADSVKGRFTISRDNSKNTLYLQMNSLRAEDTAVYYCAQELGGSWQFDYWGQGTLVTVSS

SEQ ID NO: 205 - protein, 122 aa, Artificial Sequence
  Description of Artificial Sequence: Synthetic polypeptide
EVQLLESGGGLVQPGGSLRLSCAASGFTFADRDMVWVRQAPGKGLEWVSGIGASGTSTYYADSVKGRFTISRDNSKNTLYLQMNSLRAEDAAVYYCAKGGTGPTDLWDFDYWGQGTLVTVSS

SEQ ID NO: 206 - protein, 119 aa, Artificial Sequence
  Description of Artificial Sequence: Synthetic polypeptide
EVQLLESGGGLVQPGGSLRLSCAASGFTFDDEKMLWVRQAPGKGLEWVSSISVSGLHTYYADSVKGRFTISRDNSKNTLYLQMNSLRAEDTAVYYCAKEEAGSWSFDYWGQGTLVTVSS

SEQ ID NO: 207 - protein, 119 aa, Artificial Sequence
  Description of Artificial Sequence: Synthetic polypeptide
EVQLLESGGGLVQPGGSLRLSCAASGFTFGQERMIWVRQAPGKGLEWVSDISASGGTTYYADSVKGRFTISRDNSKNTLYLQMNSLRAEDTAVYYCAKEEAGSWSFDYWGQGTLVTVSS

SEQ ID NO: 208 - protein, 116 aa, Artificial Sequence
  Description of Artificial Sequence: Synthetic polypeptide
EVQLLESGGGLVQPGGSLRLSCAASGFTFEWYEMQWVRQAPGKGLEWVSAISGDGYRTYYADSVKGRFTISRDNSMNTLYLQMNSLRAEDTAVYYCAKELGYFDYRGRGTLVTVSS

SEQ ID NO: 209 - protein, 116 aa, Artificial Sequence
  Description of Artificial Sequence: Synthetic polypeptide
EVQLLESGGGLVQPGGSLRLSCAASGFTFEWYEMQWVRRAPGKGLEWVSAISGDGYRTYYADSVKGRFTISRDNSKNTLYLQMNSLRAEDTAVYYCAKELGYFDYWGRGTLVTVSS

SEQ ID NO: 210 - protein, 116 aa, Artificial Sequence
  Description of Artificial Sequence: Synthetic polypeptide
EVQLLESGGGLVQPGGSLRLSCAASGFTFEWYEMQWVRRAPGKGLEWVSAISGDGYRTYYADSVKGRFTISRDNSKNTLYLQMNSLRAEDTAVYYCAKELGYFDYRVQGTLVTVSS

SEQ ID NO: 211 - protein, 116 aa, Artificial Sequence
  Description of Artificial Sequence: Synthetic polypeptide
EVQLLESGGGLVQPGGSLRLSCAASGFTFEWYEMQWVRKAPGKGLEWVSAISGDGYRTYYADSVKGRFTISRDNSKNTLYLQMNSLRAEDTAVYYCAKELGYFDYWGRGTLVTVSS

SEQ ID NO: 212 - protein, 116 aa, Artificial Sequence
  Description of Artificial Sequence: Synthetic polypeptide
EVQLLESGGGLVQPGGSLRLSCAASGFTFEWYEMQWVRQAPGKGLEWISAISGDGYRTYYADSVKGRFTISRDNSKNTLYLQMNSLRAEDTAVYYCAKELGYFDYRVQGTLVTVSS

SEQ ID NO: 213 - protein, 116 aa, Artificial Sequence
  Description of Artificial Sequence: Synthetic polypeptide
EVQLLESGGGLVQPGGSLRLSCAASGFTFEWYEMQWVRRAPGKGLEWVSAISGDGYRTYYADSVKGRFTISRDNSENTLYLQMNSLRAEDTAVYYCAKELGYFDYWGRGTLVTVSS

SEQ ID NO: 214 - protein, 116 aa, Artificial Sequence
  Description of Artificial Sequence: Synthetic polypeptide
EVQLLETGGGLVQPGGSLRLSCAASGFTFEWYEMQWVRRAPGKGLEWVSAISGDGYRTYYADSVKGRFTISRDNSKNTLYLQMDSLRAEDTAVYYCAKELGYFDYWGRGTLVTVTS

SEQ ID NO: 215 - protein, 116 aa, Artificial Sequence
  Description of Artificial Sequence: Synthetic polypeptide
EVQLLESGGGLVQPGGSLRLSCAASGFTFEWYEMQWVRQAPGKGLEWVSAISGDGYRTYYADSVKGRFTISRDNSKNTLYLQMNSLRAEDTAVYYCAKELGYFHYWGRGTLVTVSS

SEQ ID NO: 216 - protein, 116 aa, Artificial Sequence
  Description of Artificial Sequence: Synthetic polypeptide
EVQLLESGGGLVQPGGSLRLSCVASGFTFEWYEMQWVRQAPGNGLEWISAISGDGYRTYYADSVKGRFTISRDNSKNTLYLQMNSLRAEDTAVYYCAKELGYFDYWGRGTLVTVSS

SEQ ID NO: 217 - protein, 116 aa, Artificial Sequence
  Description of Artificial Sequence: Synthetic polypeptide
EVQLLESGGGLVQPGGSLRLSCAASGFTFEWYEMQWVRRAPGKGLEWVSAISGDGYRTYYADSVKGRFTISRDNSKNTLYLLMNSLRAEDTAVYYCAKELGYFDYWGRGTLVTVSS

SEQ ID NO: 218 - protein, 116 aa, Artificial Sequence
  Description of Artificial Sequence: Synthetic polypeptide
EVQLLESGGGLVQPGGSLRLSCAASGFTFEWYEMQWVRKAPGKGLEWVSAISGDGYRTYYADSVKGRFTISRDNSKNTLYLQMNSLRAEDTAVYYCAKELGYFDYRGRGTLVTVSS

SEQ ID NO: 219 - protein, 116 aa, Artificial Sequence
  Description of Artificial Sequence: Synthetic polypeptide
EVQLLESGGGLVQPGGSMRLSCAASGFTFEWYEMQWVRRAPGKGLEWVSAISGDGYRTYYADSVKGRFTISRDNSKNTLYLQMNSLRAEDTAVYYCAKELGYFDYRGRGTLVTVSS

SEQ ID NO: 220 - protein, 116 aa, Artificial Sequence
  Description of Artificial Sequence: Synthetic polypeptide
EVQLLESGGGLVQPGGSLRLSCAASGFTFEWYEMQWVRRAPGKGLEWVSMISGDGYRTYYADSVKGRFTISRDNSKNTLYLQMNSLRAEDTAVYYCAKELGYFDYWGRGTLVTVSS

SEQ ID NO: 221 - protein, 116 aa, Artificial Sequence
  Description of Artificial Sequence: Synthetic polypeptide
EVQLLESGGGLVQPGGSLRLSCAASGFTFEWYEMQWVRRAPGKGLEWVSAISGDGWRTYYADSVKGRFTISRDNSKNTLYLQMNSLRAEDTAVYYCAKELGYFDYWGRGTLVTVSS

SEQ ID NO: 222 - protein, 116 aa, Artificial Sequence
  Description of Artificial Sequence: Synthetic polypeptide
EVQLLESGGGLVQPGGSLRLSCAASGFTFGWYEMQWVRRAPGKGLEWVSAISGDGYRTYYADSVKGRFTISRDNSKNTLYLQMNSLRAEDTAVYYCAKELLYFDYWGRGTLVTVSS

SEQ ID NO: 223 - protein, 116 aa, Artificial Sequence
  Description of Artificial Sequence: Synthetic polypeptide
EVQLLESGGGLVQPGGSLRLSCAASGFTFEWYEMQWVRRAPGKGLEWVSAISGDGYRTYYADSVKGRFTISRDNSKNTLYLQMNSLRAEDTAVYYCAKELGFFDYWGRGTLVTVSS

SEQ ID NO: 224 - protein, 116 aa, Artificial Sequence
  Description of Artificial Sequence: Synthetic polypeptide
EVQLLESGGGLVQPGGSLRLSCAASGFTFEWYEMQWVRRAPGKGLEWVSAISGDGYRTYYADSVKGRFTISRDNSKNTLYLQMNSLRAEDTAVYYCAKELEYFDYWGRGTLVTVSS

SEQ ID NO: 225 - protein, 116 aa, Artificial Sequence
  Description of Artificial Sequence: Synthetic polypeptide
EVQLLESGGGLVQPGGSLRLSCAASGFTFEWYEMQWVRRAPGKGLEWVSAISGDGYRTYYADSVKGRFTISRDNSKNTLYLQMNSLRAEDTAVYYCAKGLEYFDYWGRGTLVTVSS

SEQ ID NO: 226 - protein, 116 aa, Artificial Sequence
  Description of Artificial Sequence: Synthetic polypeptide
EVQLLESGGGLVQPGGSLRLSCAASGFTFEWYEMQWVRRAPGKGLEWVSAISGDGYRTYYADSVKGRFTISRDNSKNTLYLQMNSLRAEDTAVYYCAKELAFFDYWGRGTLVTVSS

SEQ ID NO: 227 - protein, 116 aa, Artificial Sequence
  Description of Artificial Sequence: Synthetic polypeptide
EVQLLESGGGLVQPGGSLRLSCAASGFTFEWYEMQWVRRAPGKGLEWVSAISGDGYRTYYADSVKGRFTISRDNSKNTLYLQMNSLRAEDTAVYYCAKELLYFDYWGRGTLVTVSS

SEQ ID NO: 228 - protein, 116 aa, Artificial Sequence
  Description of Artificial Sequence: Synthetic polypeptide
EVQLLESGGGLVQPGGSLRLSCAASGFTFEWYEMQWVRRAPGKGLEWVSAISGDGYRTYYADSVKGRFTISRDNSKNTLYLQMNSLRAEDTAVYYCAKELEFFDYWGRGTLVTVSS

SEQ ID NO: 229 - protein, 116 aa, Artificial Sequence
  Description of Artificial Sequence: Synthetic polypeptide
EVQLLESGGGLVQPGGSLRLSCAASGFTFEWYEMQWVRRAPGKGLEWVSAISGDGYRTYYADSVKGRFTISRDNSKNTLYLQMNSLRAEDTAVYYCAKELQFFDYWGRGTLVTVSS

SEQ ID NO: 230 - protein, 116 aa, Artificial Sequence
  Description of Artificial Sequence: Synthetic polypeptide
EVQLLESGGGLVQPGGSLRLSCAASGFTFEWYEMQWVRRAPGKGLEWVSAISGDGYRTYYADSVKGRFTISRDNSKNTLYLQMNSLRAEDTAVYYCAKELLFFDYWGRGTLVTVSS

SEQ ID NO: 231 - protein, 116 aa, Artificial Sequence
  Description of Artificial Sequence: Synthetic polypeptide
EVQLLESGGGLVRPGGSLRLSCAASGFTFEWYEMQWVRRAPGKGLEWVSAISGDGYRTYYADSVKGRFTISRDNSKNTLYLQMNSLRAEDTAVYYCAKELEFFDYWGRGTLVTVSS

SEQ ID NO: 232 - protein, 116 aa, Artificial Sequence
  Description of Artificial Sequence: Synthetic polypeptide
EVQLLESGGGLVQPGGSLRLSCAASGFTFEWYEMQWVRRAPGKGLEWVSAISGDGYRTYYADSVKGRFTISRDNSKNTLYLQMNSLRAEDTAVYYCAKELLFFDYRGRGTLVTVSS

SEQ ID NO: 233 - protein, 116 aa, Artificial Sequence
  Description of Artificial Sequence: Synthetic polypeptide
EVQLLESGGGLVQPGGSLRLSCAASGFIFEWYEMQWVRRAPGKGLEWVSAISGDGYRTYYADSVKGRFTISRDNSKNTLYLQMNSLRAEDTAVYYCAKNLEYFDYWGRGTLVTVSS

SEQ ID NO: 234 - protein, 116 aa, Artificial Sequence
  Description of Artificial Sequence: Synthetic polypeptide
EVRLLESGGGLVQPGGSLRLSCAASGFTFEWYEMQWVRRAPGKGLEWVSAISGDGYRTYYADSVKGRFTISRDNSKNTLYLQMNSLRAEDTAVYYCAKELQFFDYWGRGTLVTVSS

SEQ ID NO: 235 - protein, 116 aa, Artificial Sequence
  Description of Artificial Sequence: Synthetic polypeptide
EVQLLGSGGGLVQPGGSLRLSCAASGFTFEEEEMIWVRQAPGKGLEWVSAISGSGGSTYYADSVKGRFTISRDNSKNTLYLQMNSLRAEDTAVYYCSKEPFRFDYWGQGTLVTVSS

SEQ ID NO: 236 - protein, 116 aa, Artificial Sequence
  Description of Artificial Sequence: Synthetic polypeptide
EVQLLASGGGLVQPGGSLRLSCAASGFTFEEEEMIWVRQAPGKGLEWVSAISGSGGSTYYADSVKGRFTISRDNSKNTLYLQMNSLRAEDTAVYYCGKEPFRYDYWGQGTLVTVSS

SEQ ID NO: 237 - protein, 116 aa, Artificial Sequence
  Description of Artificial Sequence: Synthetic polypeptide
EVQLLASGGGLVQPGGSLRLSCAASGFTFEEEEMIWVRQAPGKGLEWISAISGSGGSTYYADSVKGRFTISRDNSKNTLYLQMNSLRAEDTAVYYCGKEPFRFDYWGQGTLVTVSS

SEQ ID NO: 238 - protein, 116 aa, Artificial Sequence
  Description of Artificial Sequence: Synthetic polypeptide
EVQLLDPGGGLVQPGGSLRLSCAASGFTFGKEEMIWVRQAPGKGLEWVSSISGSGGSTYYADSVKGRFTISRDNSRNTLYLQMNSLRAEDTAVYYCGKEPFRFDYWGQGTLVTVSS

SEQ ID NO: 239 - protein, 116 aa, Artificial Sequence
  Description of Artificial Sequence: Synthetic polypeptide
EVQLLGSGGGLVQPGGSLRLSCAASGFTFEEEEMIWVRQAPGKGLEWVSAISGSGGSTYYADSVKGRFTISRDNSKNTLYLQMNSLRAEDTAVYYCGKEPFRFDYWGQGTLVTVSS

SEQ ID NO: 240 - protein, 116 aa, Artificial Sequence
  Description of Artificial Sequence: Synthetic polypeptide
EVQLLEPGGGLVQPGGSLRLSCAASGFTFEEEEMIWVRQAPGKGLEWVSAISGSGGSTYYADSVKGRFTISRDNSKNTLYLLMNSLRAEDTAVYYCSKEPFRFDYWGQGALVTVSS

SEQ ID NO: 241 - protein, 116 aa, Artificial Sequence
  Description of Artificial Sequence: Synthetic polypeptide
EVQLLDPGGGLVQPGGSLRLSCAASGFTFGKEEMIWVRQAPGKGLEWVSSISGSGGSTYYADSVKGRFTISRDNSKNTLYLQMNSLRAEDTAVYYCAKEPLRFDYWGQGTLVTVSS

SEQ ID NO: 242 - protein, 116 aa, Artificial Sequence
  Description of Artificial Sequence: Synthetic polypeptide
EVQLLESGGGLVQPGGSLRLSCAASGFTFEEEEMIWVRQAPGKGLEWISAISGSGGSTYYADSVKGRFTIHRDNSKNTLYLQMNSLRAEDTAVYYCSKEPFRFDYRGLGTLVTVSS

SEQ ID NO: 243 - protein, 116 aa, Artificial Sequence
  Description of Artificial Sequence: Synthetic polypeptide
EVQLLDPGGGLVQPGGSLRLSCAASGFTFGKEEMIWVRQAPGKGLEWVSSISGSGGSTYYADSVKGRFTISRDNSRNTLYLQMNSLRAEDTAVYYCAKEPLRFDYWGQGTLVTVSS

SEQ ID NO: 244 - protein, 116 aa, Artificial Sequence
  Description of Artificial Sequence: Synthetic polypeptide
EVQLLDSGGGFVQPGGSLRLSCAASGFTFEEEEMIWVRQAPGKGLEWISAISGSGGSTYYADSVKGRFTISRDNSKNTLYLQMNSLRAEDTAVYYCAKEPFRFDYWGQGTLVTVSS

SEQ ID NO: 245 - protein, 116 aa, Artificial Sequence
  Description of Artificial Sequence: Synthetic polypeptide
EVQLLDPGGGLVQPGGSLRLSCAASGFTFEEEEMIWVRQAPGKGLEWISAISGSGGSTYYADSVKGRFTISRDNSNNTLYLQMNSLRAEDTAVYYCGREPFRFDYWGQGTLVTVSS

SEQ ID NO: 246 - protein, 116 aa, Artificial Sequence
  Description of Artificial Sequence: Synthetic polypeptide
EVRLLESGEGLVQPGGSLRLSCAASGFTFEEEEMIWVRQAPGKGLEWVSAISGSGGSTYYADSVKGRFTISRDNSKNTLYLQMNSLRAEDTAVYYCGKEPFRFDYWGQGTLVTVSS

SEQ ID NO: 247 - protein, 116 aa, Artificial Sequence
  Description of Artificial Sequence: Synthetic polypeptide
EVQQLESGGGLVQPGGSLRLSCAASGFTFEEEEMIWVRQAPGKGLEWVSAISGSGGSTYYADSVKGRFTISRDNSKNTLYLQMNSLRAEDTAVYYCGKEPFRFDYWGQGTLVTVSS

SEQ ID NO: 248 - protein, 116 aa, Artificial Sequence
  Description of Artificial Sequence: Synthetic polypeptide
EVQLLASGGGLVQPGGSLRLSCAASGFTFEEEEMIWVRQAPGKGLEWVSAISGSGGSTYYADSVKGRFTISRDNSKNTLYLQMNSLRAEDTAVYYCGKEPFYYDYWGQGTLVTVSS

SEQ ID NO: 249 - protein, 116 aa, Artificial Sequence
  Description of Artificial Sequence: Synthetic polypeptide
EVQLLASGGGLVQPGGSLRLSCAASGFTFEEEEMIWVRQAPGKGLEWVSAISGSGGSTYYADSVKGRFTISRDNSKNTLYLQMNSLRAEDTAVYYCGKEPFYFDYWGQGTLVTVSS

SEQ ID NO: 250 - protein, 116 aa, Artificial Sequence
  Description of Artificial Sequence: Synthetic polypeptide
EVQLLASGGGLVQPGGSLRLSCAASGFTFEEKEMIWVRQAPGKGLEWVSAISGSGGSTYYADSVKGRFTISRDNSKNTLYLQMNSLRAEDTAVYYCGKEPFFYDYWGQGTLVTVSS

SEQ ID NO: 251 - protein, 116 aa, Artificial Sequence
  Description of Artificial Sequence: Synthetic polypeptide
EVQLLASGGGLVQPGGSLRLSCAASGFTFPQEEMIWVRQAPGKGLEWVSAISGSGGSTYYADSVKGRFTISRDNSKNTLYLQMNSLRAEDTAVYYCGKEPFRYDYWGQGTLVTVSS

SEQ ID NO: 252 - protein, 116 aa, Artificial Sequence
  Description of Artificial Sequence: Synthetic polypeptide
EVQLLASGGGLVQPGGSLRLSCAASGFTFFAAEMIWVRQAPGKGLEWVSAISGSGGSTYYADSVKGRFTISRDNSKNTLYLQMNSLRAEDTAVYYCGKEPFRYDYWGQGTLVTVSS

SEQ ID NO: 253 - protein, 116 aa, Artificial Sequence
  Description of Artificial Sequence: Synthetic polypeptide
EVQLLASGGGLVQPGGSLRLSCAASGFTFEEEEMIWVRQAPGKGLEWVSAISRPGTSTYYADSVKGRFTISRDNSKNTLYLQMNSLRAEDTAVYYCGKEPFRYDYWGQGTLVTVSS

SEQ ID NO: 254 - protein, 116 aa, Artificial Sequence
  Description of Artificial Sequence: Synthetic polypeptide
EVQLLASGGGLVQPGGSLRLSCAASGFTFEEEEMIWVRQAPGKGLEWVSAISRMGFSTYYADSVKGRFTISRDNSKNTLYLQMNSLRAEDTAVYYCGKEPFRYDYWGQGTLVTVSS

SEQ ID NO: 255 - protein, 116 aa, Artificial Sequence
  Description of Artificial Sequence: Synthetic polypeptide
EVQLLASGGGLVQPGGSLRLSCAASGFTFEEEEMIWVRQAPGKGLEWVSAISRWGHSTYYADSVKGRFTISRDNSKNTLYLQMNSLRAEDTAVYYCGKEPFRYDYWGQGTLVTVSS

SEQ ID NO: 256 - protein, 116 aa, Artificial Sequence
  Description of Artificial Sequence: Synthetic polypeptide
EVQLLASGGGLVQPGGSLRLSCAASGFTFEEEEMIWVRQAPGKGLEWVSAISRLGWSTYYADSVKGRFTISRDNSKNTLYLQMNSLRAEDTAVYYCGKEPFRYDYWGQGTLVTVSS

SEQ ID NO: 257 - protein, 116 aa, Artificial Sequence
  Description of Artificial Sequence: Synthetic polypeptide
EVQLLASGGGLVQPGGSLRLSCAASGFTFEEEEMIWVRQAPGKGLEWVSAISRWGASTYYADSVKGRFTISRDNSKNTLYLQMNSLRAEDTAVYYCGKEPFRYDYWGQGTLVTVSS

SEQ ID NO: 258 - protein, 116 aa, Artificial Sequence
  Description of Artificial Sequence: Synthetic polypeptide
EVQLLASGGGLVQPGGSLRLSCAASGFTFEEEEMIWVRQAPGKGLEWVSAISRQGGSTYYADSVKGRFTISRDNSKNTLYLQMNSLRAEDTAVYYCGKEPFRYDYWGQGTLVTVSS

SEQ ID NO: 259 - protein, 116 aa, Artificial Sequence
  Description of Artificial Sequence: Synthetic polypeptide
EVQLLASGGGLVQPGGSLRLSCAASGFTFEEEEMIWVRQAPGKGLEWVSAISVSGWSTYYADSVKGRFTISRDNSKNTLYLQMNSLRAEDTAVYYCGKEPFRYDYWGQGTLVTVSS

SEQ ID NO: 260 - protein, 116 aa, Artificial Sequence
  Description of Artificial Sequence: Synthetic polypeptide
EVQLLASGGGLVQPGGSLRLSCAASGFTFEEEEMIWVRQAPGKGLEWVSAISRWGWSTYYADSVKGRFTISRDNSKNTLYLQMNSLRAEDTAVYYCGKEPFRYDYWGQGTLVTVSS

SEQ ID NO: 261 - protein, 116 aa, Artificial Sequence
  Description of Artificial Sequence: Synthetic polypeptide
EVQLLASGGGLVQPGGSLRLSCAASGFTFEEEEMIWVRQAPGKGLEWVSAISRNGLSTYYADSVKGRFTISRDNSKNTLYLQMNSLRAEDTAVYYCGKEPFRYDYWGQGTLVTVSS

SEQ ID NO: 262 - protein, 116 aa, Artificial Sequence
  Description of Artificial Sequence: Synthetic polypeptide
EVQLLASGGGLVQPGGSLRLSCAASGFTFEEEEMIWVRQAPGKGLEWVSAISGLGWSTYYADSVKGRFTISRDNSKNTLYLQMNSLRAEDTAVYYCGKEPFRYDYWGQGTLVTVSS

SEQ ID NO: 263 - protein, 116 aa, Artificial Sequence
  Description of Artificial Sequence: Synthetic polypeptide
EVQLLASGGGLVQPGGSLRLSCAASGFTFEEEEMIWVRQAPGKGLEWVSAISALGWSTYYADSVKGRFTISRDNSKNTLYLQMNSLRAEDTAVYYCGKEPFRYDYWGQGTLVTVSS

SEQ ID NO: 264 - protein, 116 aa, Artificial Sequence
  Description of Artificial Sequence: Synthetic polypeptide
EVQLLASGGGLVQPGGSLRLSCAASGFTFEEEEMIWVRQAPGKGLEWVSAISRRGYSTYYADSVKGRFTISRDNSKNTLYLQMNSLRAEDTAVYYCGKEPFRYDYWGQGTLVTVSS

SEQ ID NO: 265 - protein, 116 aa, Artificial Sequence
  Description of Artificial Sequence: Synthetic polypeptide
EVQLLASGGGLVQPGGSLRLSCAASGFTFEEEEMIWVRQAPGKGLEWVSAISRHGWSTYYADSVKGRFTISRDNSKNTLYLQMNSLRAEDTAVYYCGKEPFRYDYWGQGTLVTVSS

SEQ ID NO: 266 - protein, 116 aa, Artificial Sequence
  Description of Artificial Sequence: Synthetic polypeptide
EVQLLASGGGLVQPGGSLRLSCAASGFTFEEEEMIWVRQAPGKGLEWVSSISRSGGSTYYADSVKGRFTISRDNSKNTLYLQMNSLRAEDTAVYYCGKEPFRYDYWGQGTLVTVSS

SEQ ID NO: 267 - protein, 116 aa, Artificial Sequence
  Description of Artificial Sequence: Synthetic polypeptide
EVQLLASGGGLVQPGGSLRLSCAASGFTFEEEEMIWVRQAPGKGLEWVSAISRIGNSTYYADSVKGRFTISRDNSKNTLYLQMNSLRAEDTAVYYCGKEPFRYDYWGQGTLVTVSS

SEQ ID NO: 268 - protein, 116 aa, Artificial Sequence
  Description of Artificial Sequence: Synthetic polypeptide
EVQLLASGGGLVQPGGSLRLSCAASGFTFEEEEMIWVRQAPGKGLEWVSAISGHGWSTYYADSVKGRFTISRDNSKNTLYLQMNSLRAEDTAVYYCGKEPFRYDYWGQGTLVTVSS

SEQ ID NO: 269 - protein, 116 aa, Artificial Sequence
  Description of Artificial Sequence: Synthetic polypeptide
EVQLLASGGGLVQPGGSLRLSCAASGFTFEEEEMIWVRQAPGKGLEWVSAISRWGGSTYYADSVKGRFTISRDNSKNTLYLQMNSLRAEDTAVYYCGKEPFRYDYWGQGTLVTVSS

SEQ ID NO: 270 - protein, 116 aa, Artificial Sequence
  Description of Artificial Sequence: Synthetic polypeptide
EVQLLASGGGLVQPGGSLRLSCAASGFTFEEEEMIWVRQAPGKGLEWVSAISGSGGSTYYADSVKGRFTISRDNSKNTLYLQMNSLRAEDTAVYYCGKEPFMYDYWGQGTLVTVSS

SEQ ID NO: 271 - protein, 116 aa, Artificial Sequence
  Description of Artificial Sequence: Synthetic polypeptide
EVQLLASGGGLVQPGGSLRLSCAASGFTFEEEEMIWVRQAPGKGLEWVSAISGSGGSTYYADSVKGRFTISRDNSKNTLYLQMNSLRAEDTAVYYCGKEPFPYDYWGQGTLVTVSS

SEQ ID NO: 272 - protein, 116 aa, Artificial Sequence
  Description of Artificial Sequence: Synthetic polypeptide
EVQLLASGGGLVQPGGSLRLSCAASGFTFEEEEMIWVRQAPGKGLEWVSAISGSGGGTYYADSVKGRFTISRDNSKNTLYLQMNSLRAEDTAVYYCGKEPFRYDYWGQGTLVTVSS

SEQ ID NO: 273 - protein, 116 aa, Artificial Sequence
  Description of Artificial Sequence: Synthetic polypeptide
EVQLLASGGGLVQPGGSLRLSCAASGFTFEEEEMIWVRQAPGKGLEWVSAISGSGGSTYYADSVKGRFTISRDNSKNTLYLQMNSLRAEDTAVYYCGKEPLYYDYWGQGTLVTVSS

SEQ ID NO: 274 - protein, 116 aa, Artificial Sequence
  Description of Artificial Sequence: Synthetic polypeptide
EVQLLASGGGLVQPGGSLRLSCAASGFTFEEEEMIWVRQAPGKGLEWVSAISGSGGSTYYADSVKGRFTISRDNSKNTLYLQMNSLRAEDTAVYYCGKEPMYYDYWGQGTLVTVSS

SEQ ID NO: 275 - protein, 116 aa, Artificial Sequence
  Description of Artificial Sequence: Synthetic polypeptide
EVQLLASGGGLVQPGGSLRLSCAASGFTFEEEEMIWVRQAPGKGLEWVSAISRNGFSTYYADSVKGRFTISRDNSKNTLYLQMNSLRAEDTAVYYCGKEPFRYDYWGQGTLVTVSS

SEQ ID NO: 276 - protein, 116 aa, Artificial Sequence
  Description of Artificial Sequence: Synthetic polypeptide
EVQLLASGGGLVQPGGSLRLSCAASGFTFEEEEMIWVRQAPGKGLEWVSAISRTGGSTYYADSVKGRFTISRDNSKNTLYLQMNSLRAEDTAVYYCGKEPFRYDYWGQGTLVTVSS

SEQ ID NO: 277 - protein, 116 aa, Artificial Sequence
  Description of Artificial Sequence: Synthetic polypeptide
EVQLLASGGGLVQPGGSLRLSCAASGFTFEEEEMIWVRQAPGKGLEWVSAISREGGSTYYADSVKGRFTISRDNSKNTLYLQMNSLRAEDTAVYYCGKEPFRYDYWGQGTLVTVSS

SEQ ID NO: 278 - protein, 116 aa, Artificial Sequence
  Description of Artificial Sequence: Synthetic polypeptide
EVQLLASGGGLVQPGGSLRLSCAASGFPFEEEEMIWVRQAPGKGLEWVSAISRQGWSTYYADSVKGRFTISRDNSKNTLYLQMNSLRAEDTAVYYCGKEPFRYDYWGQGTLVTVSS

SEQ ID NO: 279 - protein, 116 aa, Artificial Sequence
  Description of Artificial Sequence: Synthetic polypeptide
EVQLLASGGGLVQPGGSLRLSCAASGFTFEEEEMIWVRQAPGKGLEWVSAISRGGGSTYYADSVKGRFTISRDNSKNTLYLQMNSLRAEDTAVYYCGKEPFRYDYWGQGTLVTVSS

SEQ ID NO: 280 - protein, 116 aa, Artificial Sequence
  Description of Artificial Sequence: Synthetic polypeptide
EVQLLASGGGLVQPGGSLRLSCAASGFTFEEEEMIWVRQAPGKGLEWVSAISRTGYSTYYADSVKGRFTISRDNSKNTLYLQMNSLRAEDTAVYYCGKEPFRYDYWGQGTLVTVSS

SEQ ID NO: 281 - protein, 116 aa, Artificial Sequence
  Description of Artificial Sequence: Synthetic polypeptide
EVQLLASGGGLVQPGGSLRLSCAASGFTFEEEEMIWVRQAPGKGLEWVSAISRNGRSTYYADSVKGRFTISRDNSKNTLYLQMNSLRAEDTAVYYCGKEPFRYDYWGQGTLVTVSS

SEQ ID NO: 282 - protein, 116 aa, Artificial Sequence
  Description of Artificial Sequence: Synthetic polypeptide
EVQLLASGGGLVQPGGSLRLSCAASGFTFEEEEMIWVRQAPGKGLEWVSAISRNGYSTYYADSVKGRFTISRDNSKNTLYLQMNSLRAEDTAVYYCGKEPFRYDYWGQGTLVTVSS

SEQ ID NO: 283 - protein, 116 aa, Artificial Sequence
  Description of Artificial Sequence: Synthetic polypeptide
EVQLLASGGGLVQPGGSLRLSCAASGFTFEEEEMIWVRQAPGKGLEWVSAISRKGSSTYYADSVKGRFTISRDNSKNTLYLQMNSLRAEDTAVYYCGKEPFRYDYWGQGTLVTVSS

SEQ ID NO: 284 - protein, 116 aa, Artificial Sequence
  Description of Artificial Sequence: Synthetic polypeptide
EVQLLASGGGLVQPGGSLRLSCAASGFTFEEEEMIWVRQAPGKGLEWVSAISRGGWSTYYADSVKGRFTISRDNSKNTLYLQMNSLRAEDTAVYYCGKEPFRYDYWGQGTLVTVSS

SEQ ID NO: 285 - protein, 116 aa, Artificial Sequence
  Description of Artificial Sequence: Synthetic polypeptide
EVQLLASGGGLVQPGGSLRLSCAASGFTFEEEEMIWVRQAPGKGLEWVSAISRSGYSTYYADSVKGRFTISRDNSKNTLYLQMNSLRAEDTAVYYCGKEPFRYDYWGQGTLVTVSS

SEQ ID NO: 286 - protein, 116 aa, Artificial Sequence
  Description of Artificial Sequence: Synthetic polypeptide
EVQLLASGGGLVQPGGSLRLSCAASGFTFEEEEMIWVRQAPGKGLEWVSAISRNGMSTYYADSVKGRFTISRDNSKNTLYLQMNSLRAEDTAVYYCGKEPFRYDYWGQGTLVTVSS

SEQ ID NO: 287 - protein, 116 aa, Artificial Sequence
  Description of Artificial Sequence: Synthetic polypeptide
EVQLLESGGGLVQPGGSLRLSCAASGFTFEEEEMIWVRQAPGKGLEWVSAISRNGYSTYYADSVKGRFTISRDNSKNTLYLQMNSLRAEDTAVYYCGKEPFRYDYWGQGTLVTVSS

SEQ ID NO: 288 - protein, 116 aa, Artificial Sequence
  Description of Artificial Sequence: Synthetic polypeptide
EVQLLESGEGLVQPGGSLRLSCAASGFTFTEHEMIWVRQAPGKGLEWVSSISGNGANTYYADSVKGRFTISRDNSKNTLYLQMNSLRPEDTAVYYCAKEPLRFDYWGQGTLVTVSS

SEQ ID NO: 289 - protein, 116 aa, Artificial Sequence
  Description of Artificial Sequence: Synthetic polypeptide
EVQLLESGGGLVQPGGSLRLSCAASGSTFTEYEMIWVRQAPGKGLEWISSISGNGANTYYADSVKGRFTISRDNSKNTLYLQMNSLRAEDTAVYFCAKEPLRFDYRGQGTLVTVSS

SEQ ID NO: 290 - protein, 116 aa, Artificial Sequence
  Description of Artificial Sequence: Synthetic polypeptide
EVQLLEPGGGLVQPGGSLRLSCAASGFTFTEYEMIWVRKAPGKGMEWVSSISGNGANTYYADSVKGRFTISRDNSKNMLYLQMNSLRAEDTAVYYCAKEPLRFGYWGQGTLVTVSS

SEQ ID NO: 291 - protein, 116 aa, Artificial Sequence
  Description of Artificial Sequence: Synthetic polypeptide
EVQLLDSGGGLVQPGGSLRLSCAASGFTFTEYEMIWVRQAPGKGLEWVSSISGNGANTYYADSVKGRFTISRDNSKNTLYLQMNSLRAEDTAVYYCAKEPLRFDYWGRGTLVTVSS

SEQ ID NO: 292 - protein, 116 aa, Artificial Sequence
  Description of Artificial Sequence: Synthetic polypeptide
EVQLLGSGGGLVQPGGSLRLSCAASGFTFTEYEMIWVRQAPGKSLEWVSSISGNGANTYYADSVKGRFTISRDNSKNTLYLQMNSLRAEDTAVYYCAKEPLRYDDWGQGTLVTVSS

SEQ ID NO: 293 - protein, 116 aa, Artificial Sequence
  Description of Artificial Sequence: Synthetic polypeptide
EVQPLESGGGLVQPGGSLRLSCSASGFTFNEYEMIWVRQAPGKGLEWVSSISGNGANTYYADSVKGRFTISRDNSKNTLYLQMNSLRAEDTAVYYCAKEPLRFDYWGQGTLVTVSS

SEQ ID NO: 294 - protein, 116 aa, Artificial Sequence
  Description of Artificial Sequence: Synthetic polypeptide
EVQLLESGEGLVQPGGSLRLSCAASGFTFAEYEMIWVRQAPGKGLEWVSSISGNGANTYYADSVKGRFTISRDNSKNTLYLQMNSLRAEDTAVYYCAKEPLRFDYWGQGTLVTVSS

SEQ ID NO: 295 - protein, 116 aa, Artificial Sequence
  Description of Artificial Sequence: Synthetic polypeptide
EVQLLDPGGGLVQPGGSLRLSCAASGFTFTESEMIWVRQAPGKGLEWVSSISGNGANTYYADSVKGRFTISRDNSKNTLYLQMNSLRAEDTAVYYCAKEPLRFDYWGQGTLVTVSS

SEQ ID NO: 296 - protein, 116 aa, Artificial Sequence
  Description of Artificial Sequence: Synthetic polypeptide
EVQLLEPGGGLVQPGGSLRLSCAASGFTFTEYEMIWVRKAPGKGMEWVSSISGNGANTYYADSVKGRFTISRDNSKNTLYLQMNSLRPEDTAVYYCAKEPLRFDDWGQGTLVTVSS

SEQ ID NO: 297 - protein, 116 aa, Artificial Sequence
  Description of Artificial Sequence: Synthetic polypeptide
EVQLLESGVGLVQPGGSLRLSCAASGFTFTEYEMIWVRKAPGKGLEWVSSISGNGANTYYADSVKGRFTISRDNSKNTLYLQMNSLRAEDTAVYYCAKEPLRFDNWGQGTLVTVSS

SEQ ID NO: 298 - protein, 116 aa, Artificial Sequence
  Description of Artificial Sequence: Synthetic polypeptide
EVQLLESRGGLVQPGGSLRLSCAASGFTFTEHEMIWVRQAPGKGLEWVSSISGNGANTYYADSVKGRFSVSRDNSKNTLYLQMNSLRAEDTAVYYCAKEPLRFDYWGQGTLVTVSS

SEQ ID NO: 299 - protein, 116 aa, Artificial Sequence
  Description of Artificial Sequence: Synthetic polypeptide
EVQPLESGGGLVQPGGSLRLSCAASGFTFTEYEMIWVRQAPGKGLEWVSSISGNGANTYYADSVKGRFTISRDNSKNTLYLQMNSLRAEDTAVYYCAKEPLRFDYWGQGTLVTVSS

SEQ ID NO: 300 - protein, 116 aa, Artificial Sequence
  Description of Artificial Sequence: Synthetic polypeptide
EVQLLESAGGLVQPGGSLRLSCAASGFTFAEYEMIWVRQAPGKGLEWVSSISGNGANTYYADSVKGRFTISRDNSKNTLYLQMNSLRAEDTAVYYCAKEPLRFDYWGQGALVTVSS

SEQ ID NO: 301 - protein, 116 aa, Artificial Sequence
  Description of Artificial Sequence: Synthetic polypeptide
EVQLLEPGGGLVQPGGSLRLSCAASGFTFTEYEMIWVRQAPGKGLEWVSSISGNGANTYYADSVKGRFTISRDNSKNTLYLQMNSLRAEDTAVYYCAKEPLRFDNWGQGTLVTVSS

SEQ ID NO: 302 - protein, 123 aa, Artificial Sequence
  Description of Artificial Sequence: Synthetic polypeptide
EVQLLESGGGLVQPGGSLRLSCTASGFTFNMYEMSWVRQAPGKGLEWVSGISRRGFTTYYADSVKGRFTISRDNSKNTLYLQMNSLRAEDTAVYYCAKEPITYDLRYARFDYSGQGTLVTVSS

SEQ ID NO: 303 - protein, 123 aa, Artificial Sequence
  Description of Artificial Sequence: Synthetic polypeptide
EEQLLESGGGLVQPGGSLRLSCTASGFTFNMYEMSWVRQAPGKGLEWVSGISRRGFTTYYADSVKGRFTISRDNSKNTLYLQMNSLRAEDTAVYYCAKEPITYATRYARFDYWGQGTLVTVSS

SEQ ID NO: 304 - protein, 123 aa, Artificial Sequence
  Description of Artificial Sequence: Synthetic polypeptide
EVQLLESGGGLVQPGGSLRLSCTASGFTFNMYEMSWVRQAPGKGLEWVSGISRRGFTTYYADSVKGRFTISRDNFKNTLYLQMNSLRAEDTAVYYCAKEPITYDMRYARFDYGGQGTLVTVSS

SEQ ID NO: 305 - protein, 123 aa, Artificial Sequence
  Description of Artificial Sequence: Synthetic polypeptide
EVQLLESGGGLVQPGGSLRLSCTASGFTFNMYEMSWVRQAPGKGLEWVSGISRRGFTTYYADSVKGRFTISRDNSKNTLYLQMNSLRAEDTAVYYCAKEPITYDMRYARFDNWGQGTLVTVSN

SEQ ID NO: 306 - protein, 123 aa, Artificial Sequence
  Description of Artificial Sequence: Synthetic polypeptide
EVQLLESGGGLVQPGGSLRLSCTASGFTFNTYEMSWVRQAPGKGLEWVSGIGRRGFTTYYADSVKGRFTISRDNSKNTLYLQMNSLRAEDTAVYYCAKEPITYDLRYARFDYSGQGTLVTVSS

SEQ ID NO: 307 - protein, 123 aa, Artificial Sequence
  Description of Artificial Sequence: Synthetic polypeptide
EVQLMESGGGLVQPGGSLRLSCTASGFSFNMYEMSWVRQAPGKGLEWVSGISRRGYTTYYADSVKGRFTISRDNSKNTLYLQMNSLRAEDTAVYYCAKEPITYDMRYARFDYWGRGTLVTVSS

SEQ ID NO: 308 - protein, 123 aa, Artificial Sequence
  Description of Artificial Sequence: Synthetic polypeptide
EVQLLESGGGLVQPGGSLRLSCTASGFAFNMYEMSWVRQAPGKGLEWVSGISRHGFTTYYADSVKGRFTVSRDNSKNTLYLQMNSLRAEDTAVYYCAKEPITYDMRYARSDYWGQGTLVTVSS

SEQ ID NO: 309 - protein, 123 aa, Artificial Sequence
  Description of Artificial Sequence: Synthetic polypeptide
EVQLLESGGGLVQPGGSLRLSCTASGFTFNMYEMSWVRQAPGKGLEWVSGISRRGFTTYYADSVKGRFTISRDNSKNTLYLQMNSLRAEDTAVYFCAKEPITYDMRYARSDYWGQGTLVTVSS

SEQ ID NO: 310 - protein, 123 aa, Artificial Sequence
  Description of Artificial Sequence: Synthetic polypeptide
EVQLLESGGGLVQPGGSLRLSCTASGFTFNMYEMSWVRQAPGKGLEWVSGISRRGFTTYYADSVKGRFTISRDNSKNTLYLQMNSLRAEDTAVYYCAKEPITYSMRYARFDYSGLGTMVTVSS

SEQ ID NO: 311 - protein, 123 aa, Artificial Sequence
  Description of Artificial Sequence: Synthetic polypeptide
EVQLLESGGGLVQPGGSLRLSCTASGFTFNMYEMSWVRQAPGKGLEWVSGISRRGFTTYYADSVKGRFTISRDNSKNTLYLQMNSLRAEDTAVYYCAKEPITYDMRYARFDYSGQGTLVTVSS

SEQ ID NO: 312 - protein, 123 aa, Artificial Sequence
  Description of Artificial Sequence: Synthetic polypeptide
EVQLLESGGGLVQPGGSLRLSCTASGFTFNMYEMSWVRKAPGKGLEWVSGISRHGFTTYYADSVKGRFTISRDNSKNTLYLQMNSLRAEDTAVYYCAKEPITYDMRYARFDYWGQGTLVTVSS

SEQ ID NO: 313 - protein, 123 aa, Artificial Sequence
  Description of Artificial Sequence: Synthetic polypeptide
EVQLFESGGGLVQPGGSLRLSCTASGFTFNMYEMSWVRQAPGKGLEWVSGISRRGFTTYYADSVKGRFTISRDNSKNTLYLQMNSLRAEDTAVYYCAKEPITYDMRYARFDYWGRGTLVTVSS

SEQ ID NO: 314 - protein, 123 aa, Artificial Sequence
  Description of Artificial Sequence: Synthetic polypeptide
EVQLLESGGGLVQPGGSLRLSCTASGFTFNMYEMSWVRQAPGKGLEWVSGISRRGFTTYYADSVKGRFTISRDNSKNTLYLQMNSLRAEDTAVYYCAKEPITYDMRYARFDYWGRGTLVTVSS

SEQ ID NO: 315 - protein, 123 aa, Artificial Sequence
  Description of Artificial Sequence: Synthetic polypeptide
EVQLLESGGGSVQPGGSLRLSCTASGFSFNMYEMSWVRQAPGKGLEWVSGISRRGFTTYYADSVKGRFTISRDNSKNTLYLQMNSLRAEDTAVYYCAKEPITYDMRYARFDYWGQGTLVTVSG

SEQ ID NO: 316 - protein, 123 aa, Artificial Sequence
  Description of Artificial Sequence: Synthetic polypeptide
EVQLLESGGGLVQPGGSLRLSCTASGFTFNMYEMSWVRKAPGKGLEWVSGISRRGFTTYYADSVKGRFTISRDNSKNTLYLQMNSLRAEDTAVYYCAKEPITYDMRYARFDYWGQGTLVTVSS

SEQ ID NO: 317 - protein, 116 aa, Artificial Sequence
  Description of Artificial Sequence: Synthetic polypeptide
EVQLLESGGGLVQPGGSLRLSCAASGFTFRDYEMWWVRQAPGKGLERVSAINPQGTRTYYADSVKGRFTISRDNSKNTLYLQMNSLRAEDTAVYYCAKLPFTFEDWGQGTLVTVSS

SEQ ID NO: 318 - protein, 116 aa, Artificial Sequence
  Description of Artificial Sequence: Synthetic polypeptide
EVQLLESGGGLVQPGGSLRLSCAASGFTFRDYEMWWVRQAPGKGLERVSAINPQGTRTYYADSVKGRFTISRDNSKNTLYLQMNSLRAEDTAVYYCAKLPFTFDDWGQGTLVTVSS

SEQ ID NO: 319 - protein, 116 aa, Artificial Sequence
  Description of Artificial Sequence: Synthetic polypeptide
EVQLLESGGGLVQPGGSLRLSCAASGFTFRDYEMWWVRQAPGKGLERVSAINPQGTRTYYADSVKGRFTISRDNSKNTLYLQMNSLRAEDTAVYYCTKLPFIFEYWGQGTLVTVSS

SEQ ID NO: 320 - protein, 116 aa, Artificial Sequence
  Description of Artificial Sequence: Synthetic polypeptide
EVQLLESGGGLVQPGGSLRLSCAASGFTFRDYEMWWVRQAPGKGLERVSAINPQGTRTYYADSVKGRFTISRDNSKNTLYLQMNSLRAEDTAVYYCAKLPFMFDDRGQGTLVTVSS

SEQ ID NO: 321 - protein, 116 aa, Artificial Sequence
  Description of Artificial Sequence: Synthetic polypeptide
EVQLLESGGGLVQPGGSLRLSCAASGFTFRDYEMWWVRQAPGKGLERVSAINPQGTRTYYADSVMGRFTISRDNSKNTLYLQMNSLRAEDTAVYYCAKLPFTFDDWGQGTLVTVSS

SEQ ID NO: 322 - protein, 116 aa, Artificial Sequence
  Description of Artificial Sequence: Synthetic polypeptide
EVQLLESGGGLVQPGGSLRLSCAASGFSFRDYEMWWYRQAPGKGLERVSAINPQGTRTYYADSVKGRFTISRDNSKNTLYLQMNSLRAEDTAVYYCAKLPFIFDNRGQGTLVTVSS

SEQ ID NO: 323 - protein, 116 aa, Artificial Sequence
  Description of Artificial Sequence: Synthetic polypeptide
EVQLLESGGGLVQPGGSLRLSCAASGFTFRDYEMWWVRQAPGKGLERVSAINPQGTRTYYADSVKGRFTISRDNSKNTLYLQMNSLRAEDTSVYHCAKPPFIFGDWGPGTLVTVSS

SEQ ID NO: 324 - protein, 116 aa, Artificial Sequence
  Description of Artificial Sequence: Synthetic polypeptide
EVQLLESGGGLVQPGGSRRLSCAASGFTFRDYEMWWVRQAPGKGLERVSAINPQGTRTYYADSVKGRFTISRDNSKNTLYLQMNSLRAEDTAVYYCAKLPFTFEDWGQGTLVTVSS

SEQ ID NO: 325 - protein, 116 aa, Artificial Sequence
  Description of Artificial Sequence: Synthetic polypeptide
EVQLLESGGGLVQPGGSLRLSCAASGFTFRDYEMWWVRQAPGKGLERVSAINPQGTRTYYADSVMGRFTISRDNSKNTLYLQMNSLRAEDTAVYYCAKLPFMFDDRGQGTLVTVSS

SEQ ID NO: 326 - protein, 116 aa, Artificial Sequence
  Description of Artificial Sequence: Synthetic polypeptide
EVQLLESGGGLVQPGGSLRLSCAASGFTFRDYEMWWVRQAPGKVLERVSAINPQGTRTYYADSVKGRFTISRDNSKNMLYLQMNSLRAEDTAVYYCAKLPFMFDDRGQGTLVTVSS

SEQ ID NO: 327 - protein, 116 aa, Artificial Sequence; identical to SEQ ID NO: 320
  Description of Artificial Sequence: Synthetic polypeptide

SEQ ID NO: 328 - protein, 116 aa, Artificial Sequence
  Description of Artificial Sequence: Synthetic polypeptide
EVQLLESGGGLIQPGGSLRLSCAASGFTFRDYEMWWVRQAPGKGLERVSAINPQGTRTYYADSVKGRFTISRDNSKNTLYLQMNSLRAEDTAVYYCLKLPFIFDYWGQGTLVTVSS

SEQ ID NO: 329 - protein, 116 aa, Artificial Sequence
  Description of Artificial Sequence: Synthetic polypeptide
EVQLLESGGGLVQPGGSLRLSCAASGFTFRDYEMWWVRQAPGKGLERVSAINPQGTRTYYADSVKGRFTISRDNSKNTLYLQMNSLRADDTAVYHCTKLPFIFDYWGQGTLVTVSS

SEQ ID NO: 330 - protein, 116 aa, Artificial Sequence
  Description of Artificial Sequence: Synthetic polypeptide
EVQLLESGGGLVQPGGSLRLSCAASGFTFRDYEMWWVRQAPGMVLERVSAINPQGTRTYYADSVKGRFTISRDNSKNTLYLQMNSLRAEDTAVYYCAKLPFFFDSRGQGTLVTVSS

SEQ ID NO: 331 - protein, 116 aa, Artificial Sequence
  Description of Artificial Sequence: Synthetic polypeptide
EVQLLESGGGLVQPGGSLRLSCAASGFTFRDYEMWWVRRAPGKGLERVSAINPQGTRTYYADSVKGRFTISRDNSKNTLYLQMNSLRAEDTAVYYCAKLPFTFEDWGQGTLVTVSS

SEQ ID NO: 332 - protein, 116 aa, Artificial Sequence
  Description of Artificial Sequence: Synthetic polypeptide
EVQLLESGGGLVQPGGSLRLSCAASGFTFRDYEMWWVRQAPGKGLERVSAINPQGTRTYYADSVMGRFTISRDNSKNTLYLQMNSLRAEDTAVYYCAKLPFTFEDWGQGTLVTVSS

SEQ ID NO: 333 - protein, 116 aa, Artificial Sequence
  Description of Artificial Sequence: Synthetic polypeptide
EVQLLESGGGLVQPGGSLRLSCAASGFSFRDYEMWWYRQAPGKGLERVSAINPQGTRTYYADSVKGRFTISRDNSKNTLYLQMNSLRAEDTAVYYCAKLPFTFEDWGQGTLVTVSS

SEQ ID NO: 334 - protein, 116 aa, Artificial Sequence
  Description of Artificial Sequence: Synthetic polypeptide
EVQLLESGGGLVQPGGSLRLSCAASGFTFRDYEMWWVRQAPGKVLERVSAINPQGTRTYYADSVKGRFTISRDNSKNMLYLQMNSLRAEDTAVYYCAKLPFTFEDWGQGTLVTVSS

SEQ ID NO: 335 - protein, 116 aa, Artificial Sequence
  Description of Artificial Sequence: Synthetic polypeptide
EVQLLESGGGLVQPGGSLRLSCAASGFTFRDYEMWWVRQAPGKGLERVSAINPQGTRTYYADSVKGRFTISRDNSKNTLYLQMNSLRAEDTAVYHCAKLPFTFEDWGQGTLVTVSS

SEQ ID NO: 336 - protein, 116 aa, Artificial Sequence
  Description of Artificial Sequence: Synthetic polypeptide
EVQLLESGGGLVQPGGSLRLSCAASGFTFRDYEMWWVRQAPGKGLERVSAINPQGTRTYYADSVKGRFTISRDNSKNTLYLQMNSLRAEDTAVYYCTKLPFTFEDWGQGTLVTVSS

SEQ ID NO: 337 - protein, 116 aa, Artificial Sequence
  Description of Artificial Sequence: Synthetic polypeptide
EVQLLESGGGLVQPGGSLRLSCAASGFTFRDYEMWWVRQAPGKGLERVSAINPQGTRTYYADSVKGRFTISRDNSKNTLYLQMNSLRAEDTAVYYCLKLPFTFEDWGQGTLVTVSS

SEQ ID NO: 338 - protein, 116 aa, Artificial Sequence
  Description of Artificial Sequence: Synthetic polypeptide
EVQLLESGGGLVQPGGSLRLSCAASGFTFRDYEMWWVRQAPGKGLERVSAINPQGTRTYYADSVKGRFTISRDNSKNTLYLQMNSLRADDTAVYHCTKLPFIFEYWGQGTLVTVSS

SEQ ID NO: 339 - protein, 116 aa, Artificial Sequence
  Description of Artificial Sequence: Synthetic polypeptide
EVQLLESGGGLVQPGGSLRLSCAASGFTFRDYEMWWVRQAPGKGLERVSAINPQGTRTYYADSVMGRFTISRDNSKNTLYLQMNSLRAEDTAVYYCAKEPYSFDSWGQGTLVTVSS

SEQ ID NO: 340 - protein, 116 aa, Artificial Sequence
  Description of Artificial Sequence: Synthetic polypeptide
EVQLLESGGGLVQPGGSLRLSCAASGFTFRDYEMWWVRQAPGKGLERVSAINPQGTRTYYADSVMGRFTISRDNSKNTLYLQMNSLRAEDTAVYHCAKEPYSYDYWGQGTLVTVSS

SEQ ID NO: 341 - protein, 116 aa, Artificial Sequence
  Description of Artificial Sequence: Synthetic polypeptide
EVQLLESGGGLVQPGGSLRLSCAASGFTFRDYEMWWVRRAPGKGLERVSAINPQGTRTYYADSVMGRFTISRDNSKNTLYLQMNSLRAEDTAVYYCAKLPFTFDDWGQGTLVTVSS

SEQ ID NO: 342 - protein, 116 aa, Artificial Sequence
  Description of Artificial Sequence: Synthetic polypeptide
EVQLLESGGGLVQPGGSLRLSCAASGFTFRDYEMWWVRRAPGKGLERVSAINPQGTRTYYADSVMGRFTISRDNSKNTLYLQMNSLRAEDTAVYYCAKLPFMFDDRGQGTLVTVSS

SEQ ID NO: 343 - protein, 116 aa, Artificial Sequence
  Description of Artificial Sequence: Synthetic polypeptide
EVQLLESGGGLVQPGGSLRLSCAASGFTFRDYEMWWVRQAPGKGLERVSAINPQGTRTYYADSVMGRFTISRDNSKNTLYLQMNSLRAEDTAVYYCAKLPFMFDDWGQGTLVTVSS

SEQ ID NO: 344 - protein, 116 aa, Artificial Sequence
  Description of Artificial Sequence: Synthetic polypeptide
EVQLLESGGGLVQPGGSLRLSCAASGFTFAGYELWWVRQAPGKGLERVSAINPQGTRTYYADSVMGRFTISRDNSKNTLYLQMNSLRAEDTAVYYCAKLPFTFDDWGQGTLVTVSS

SEQ ID NO: 345 - protein, 116 aa, Artificial Sequence
  Description of Artificial Sequence: Synthetic polypeptide
EVQLLESGGGLVQPGGSLRLSCAASGFTFAGYELWWVRQAPGKGLERVSAINPQGTRTYYADSVMGRFTISRDNSKNTLYLQMNSLRAEDTAVYYCAKLPFMFDDRGQGTLVTVSS

SEQ ID NO: 346 - protein, 116 aa, Artificial Sequence
  Description of Artificial Sequence: Synthetic polypeptide
EVQLLESGGGLVQPGGSLRLSCAASGFTFAGYEMWWFRQAPGKGLERVSAINPQGTRTYYADSVMGRFTISRDNSKNTLYLQMNSLRAEDTAVYYCAKLPFTFDDWGQGTLVTVSS

SEQ ID NO: 347 - protein, 116 aa, Artificial Sequence
  Description of Artificial Sequence: Synthetic polypeptide
EVQLLESGGGLVQPGGSLRLSCAASGFTFAGYEMWWFRQAPGKGLERVSAINPQGTRTYYADSVMGRFTISRDNSKNTLYLQMNSLRAEDTAVYYCAKLPFMFDDRGQGTLVTVSS

SEQ ID NO: 348 - protein, 116 aa, Artificial Sequence
  Description of Artificial Sequence: Synthetic polypeptide
EVQLLESGGGLVQPGGSLRLSCAASGFTFRDYEMWWVRQAPGKGLEWVSAINPQGTRTYYADSVMGRFTISRDNSKNTLYLQMNSLRAEDTAVYYCAKLPFTFDDWGQGTLVTVSS

SEQ ID NO: 349 - protein, 116 aa, Artificial Sequence
  Description of Artificial Sequence: Synthetic polypeptide
EVQLLESGGGLVQPGGSLRLSCAASGFTFRDYEMWWVRQAPGKGLEWVSAINPQGTRTYYADSVMGRFTISRDNSKNTLYLQMNSLRAEDTAVYYCAKLPFMFDDRGQGTLVTVSS

SEQ ID NO: 350 - protein, 116 aa, Artificial Sequence
  Description of Artificial Sequence: Synthetic polypeptide
EVQLLESGGGLVQPGGSLRLSCAASGFTFRDYEMWWVRQAPGKGLERVSAINPQGTRTYYADSVKGRFTISRDNSKNTLYLQMNSLRAEDTAVYYCAKLPTYFSDRGQGTLVTVSS

SEQ ID NO: 351 - protein, 116 aa, Artificial Sequence
  Description of Artificial Sequence: Synthetic polypeptide
EVQLLESGGGLVQPGGSLRLSCAASGFTFRDYEMWWVRQAPGKGLERVSAINPQGTRTYYADSVKGRFTISRDNSKNTLYLQMNSLRAEDTAVYYCAKLPFFFEEWGQGTLVTVSS

SEQ ID NO: 352 - protein, 116 aa, Artificial Sequence
  Description of Artificial Sequence: Synthetic polypeptide
EVQLLESGGGLVQPGGSLRLSCAASGFTFRDYEMWWVRQAPGKGLERVSAINPQGTRTYYADSVKGRFTISRDNSKNTLYLQMNSLRAEDTAVYYCAKLPTYFKDWGQGTLVTVSS

SEQ ID NO: 353 - protein, 116 aa, Artificial Sequence
  Description of Artificial Sequence: Synthetic polypeptide
EVQLLESGGGLVQPGGSLRLSCAASGFTFRDYEMWWVRQAPGKGLERVSAINPQGTRTYYADSVKGRFTISRDNSKNTLYLQMNSLRAEDTAVYYCAKLPFYFSEWGQGTLVTVSS

SEQ ID NO: 354 - protein, 116 aa, Artificial Sequence
  Description of Artificial Sequence: Synthetic polypeptide
EVQLLESGGGLVQPGGSLRLSCAASGFTFRDYEMWWVRQAPGKGLERVSAINPQGTRTYYADSVKGRFTISRDNSKNTLYLQMNSLRAEDTAVYHCAKLPMFFEDWGQGTLVTVSN

SEQ ID NO: 355 - protein, 116 aa, Artificial Sequence
  Description of Artificial Sequence: Synthetic polypeptide
EVQLLESGGGLVQPGGSLRLSCAASGFTFRDYEMWWVRQAPGKGLERVSAINPQGTRTYYADSVKGRFTISRDNSKNTLYLQMNSLRAEDTAVYYCAKLPFPFSEWGQGTLVTVSS

SEQ ID NO: 356 - protein, 116 aa, Artificial Sequence
  Description of Artificial Sequence: Synthetic polypeptide
EVQLLESGGGLVQPGGSLRLSCAASGFTFRDYEMWWVRQAPGKGLERVSAINPQGTRTYYADSVKGRFTISRDNSKNTLYLQMDSLRAEDTAVYYCAKLPFYFSEWGQGTLVTVSS

SEQ ID NO: 357 - protein, 116 aa, Artificial Sequence
  Description of Artificial Sequence: Synthetic polypeptide
EVQLLESGGGLVQPGGSLRLSCAASGFTFRDYEMWWVRQAPGKGLERVSAINPYGNLTYYADSVKGRFTISRDNSKNTLYLQMNSLRAEDTAVYYCAKLPFTFEDWGQGTLVTVSS

SEQ ID NO: 358 - protein, 116 aa, Artificial Sequence
  Description of Artificial Sequence: Synthetic polypeptide
EVQLLESGGGLVQPGGSLRLSCAASGFTFRDYEMWWVRQAPGKGLERVSAINPPGTLTYYADSVKGRFTISRDNSKNTLYLQMNSLRAEDTAVYYCAKLPFTFEDRGQGTLVTVSS

SEQ ID NO: 359 - protein, 116 aa, Artificial Sequence
  Description of Artificial Sequence: Synthetic polypeptide
EVQLLESGGGLVQPGGSLRLSCAASGFTFRDYEMWWVRQAPGKGLERVSAINPWGGLTYYADSVKGRFTISRDNSKNTLYLQMNSLRAEDTAVYYCAKLPFTFEDWGQGTLVTVSS

SEQ ID NO: 360 - protein, 116 aa, Artificial Sequence
  Description of Artificial Sequence: Synthetic polypeptide
EVQLLESGGGLVQPGGSLRLSCAASGFTFRDYEMWWVRQAPGKGLERVSAINPMGGFTYYADSVKGRFTISRDNSKNTLYLQMNSLRAEDTAVYYCAKLPFTFEDWGQGTLVTVSS

SEQ ID NO: 361 - protein, 116 aa, Artificial Sequence
  Description of Artificial Sequence: Synthetic polypeptide
EVQLLESGGGLVQPGGSLRLSCAASGFTFRDYEMWWVRQAPGKGLERVSAINPWGSHTYYADSVKGRFTISRDNSKNTLYLQMNSLRAEDTAVYYCAKLPFTFEDWGQGTLVTVSS

SEQ ID NO: 362 - protein, 116 aa, Artificial Sequence
  Description of Artificial Sequence: Synthetic polypeptide
EVQLLESGGGLVQPGGSLRLSCAASGFTFRDYEMWWVRQAPGKGLERVSAINPSGGLTYYADSVKGRFTISRDNSKNTLYLQMNSLRAEDTAVYYCAKLPFTFDDRGQGTLVTVSS

SEQ ID NO: 363 - protein, 116 aa, Artificial Sequence
  Description of Artificial Sequence: Synthetic polypeptide
EVQLLESGGGLVQPGGSLRLSCAASGFTFRDYEMWWVRQAPGKGLERVSAINPHGSLTYYADSVKGRFTISRDNSKNTLYLQMNSLRAEDTAVYYCAKLPFTFDDWGQGTLVTVSS

SEQ ID NO: 364 - protein, 116 aa, Artificial Sequence
  Description of Artificial Sequence: Synthetic polypeptide
EVQLLESGGGLVQPGGSLRLSCAASGFTFRDYEMWWVRQAPGKGLERVSAINPAGRLTYYADSVKGRFTISRDNSKNTLYLQMNSLRAEDTAVYYCAKLPFTFEDWGQGTLVTVSS

SEQ ID NO: 365 - protein, 116 aa, Artificial Sequence
  Description of Artificial Sequence: Synthetic polypeptide
EVQLLESGGGLVQPGGSLRLSCAASGFTFRDYEMWWVRQAPGKGLERVSAINPWGSLTYYADSVKGRFTISRDNSKNTLYLQMNSLRAEDTAVYYCAKLPFTFEDWGQGTLVTVSS

SEQ ID NO: 366 - protein, 116 aa, Artificial Sequence
  Description of Artificial Sequence: Synthetic polypeptide
EVQLLESGGGLVQPGGSLRLSCAASGFTFPDYEMWWVRQAPGKGLERVSAINPQGTRTYYADSVKGRFTISRDNSKNTLYLQMNSLRAEDTAVYHCAKLPFTFDDWGQGTLVTVSS

SEQ ID NO: 367 - protein, 116 aa, Artificial Sequence
  Description of Artificial Sequence: Synthetic polypeptide
EVQLLESGGGLVQPGGSLRLSCADSGFTFPPVEMWWVRQAPGKGLERVSAINPQGTRTYYADSVKGRFTISRDNSKNTLYLQMNSLRAEDTAVYYCAKLPFTFEDWGQGTLVTVSS

SEQ ID NO: 368 - protein, 116 aa, Artificial Sequence
  Description of Artificial Sequence: Synthetic polypeptide
EVQLLESGGGLVQPGGSLRLSCAASGFTFRDYEMWWVRQAPGKGLERVSAINPYGGLTYYADSVKGRFTISRDNSKNTLYLQMNSLRAEDTAVYYCAKLPFTFDDWGQGTLVTVSS

SEQ ID NO: 369 - protein, 116 aa, Artificial Sequence
  Description of Artificial Sequence: Synthetic polypeptide
EVQLLESGGGLVQPGGSLRLSCAASGFTFRDYEMWWVRQAPGKGLERVSAINPWGNHTYYADSVKGRFTISRDNSKNTLYLQMNSLRAEDTAVYYCAKLPFTFEDWGQGTLVTVSS

SEQ ID NO: 370 - protein, 116 aa, Artificial Sequence
  Description of Artificial Sequence: Synthetic polypeptide
EVQLLESGGGLVQPGGSLRLSCAASGFTFRDYEMWWVRQAPGKGLERVSAINPHGGYTYYADSVKGRFTISRDNSKNTLYLQMNSLRAEDTAVYYCAKLPFTFEDWGQGTLVTVSS

SEQ ID NO: 371 - protein, 116 aa, Artificial Sequence
  Description of Artificial Sequence: Synthetic polypeptide
EVQLLESGGGLVQPGGSLRLSCAASGFTFRDYEMWWVRQAPGRGLERVSAINPPGMLTYYADSVKGRFTISRDNSKNTLYLQMNSLRAEDTAVYYCAKLPFTFDDWGQGTLVTVSS

SEQ ID NO: 372 - protein, 116 aa, Artificial Sequence
  Description of Artificial Sequence: Synthetic polypeptide
EVQLLESGGGLVQPGGSLRLSCAASGFTFRDYEMWWVRQAPGKGLERVSAINPWGQLTYYADSVKGRFTISRDNSKNTLYLQMNSLRAEDTAVYYCAKLPFTFEDWGQGTLVTVSS

SEQ ID NO: 373 - protein, 116 aa, Artificial Sequence
  Description of Artificial Sequence: Synthetic polypeptide
EVQLLESGGGLVQPGGSLRLSCAASGFTFRDYEMWWVRQAPGKGLERVSAINPWGGYTYYADSVKGRFTISRDNSKNTLYLQMNSLRAEDTAVYYCAKLPFTFDDWGQGTLVTVSS

SEQ ID NO: 374 - protein, 116 aa, Artificial Sequence
  Description of Artificial Sequence: Synthetic polypeptide
EVQLLESGGGLVQPGGSLRLSCAASGFTFRDYEMWWVRQAPGKGLERVSAINPSGGLTYYADSVKGRFTISRDNSKNTLYLQMNSLRAEDTAVYYCAKLPFTFEDWGQGTLVTVSS

SEQ ID NO: 375 - protein, 116 aa, Artificial Sequence
  Description of Artificial Sequence: Synthetic polypeptide
EVQLLESGGGLVQPGGSLRLSCAASGFTFRDYEMWWVRQAPGKGLERVSAINPSGGLTYYADSVKGRFTISRDNSKNTLYLQMNSLRAEDTAVYYCAKLPFTFDDWGQGTLVTVSS

SEQ ID NO: 376 - protein, 116 aa, Artificial Sequence
  Description of Artificial Sequence: Synthetic polypeptide
EVQLLESGGGLVQPGGSLRLSCAASGFTFRDYEMWWVRQAPGKGLERVSAINPSGTLTYYADSVKGRFTISRDNSKNTLYLQMNSLRAEDTAVYYCAKLPFTFEDWGQGTLVTVSS

SEQ ID NO: 377 - protein, 116 aa, Artificial Sequence
  Description of Artificial Sequence: Synthetic polypeptide
EVQLLESGGGLVQPGGSLRLSCAASGFTFRDYEMWWVRQAPGKGLERVSAINPYGSLTYYADSVKGRFTISRDNSKNTLYLQMNSLRAEDTAVYYCAKLPFTFDDWGQGTLVTVSS

SEQ ID NO: 378 - protein, 116 aa, Artificial Sequence
  Description of Artificial Sequence: Synthetic polypeptide
EVQLLESGGGLVQPGGSLRLSCAASGFTFRDYEMWWVRQAPGKGLERVSAINPWGGYTYYADSVKGRFTISRDNSKNTLYLQMNSLRAEDTAVYYCAKLPFTFEDWGQGTLVTVSS

SEQ ID NO: 379 - protein, 116 aa, Artificial Sequence
  Description of Artificial Sequence: Synthetic polypeptide
EVQLLESGGGLVQPGGSLRLSCAASGFTFRDYEMWWVRQAPGKGLERVSAINPQGGLTYYADSVKGRFTISRDNSKNTLYLQMNSLRAEDTAVYYCAKLPFTFEDWGQGTLVTVSS

SEQ ID NO: 380 - protein, 116 aa, Artificial Sequence
  Description of Artificial Sequence: Synthetic polypeptide
EVQLLESGGGLVQPGGSLRLSCAASGFTFRDYEMWWVRQAPGKGLERVSAINPWGSHTYYADSVKGRFTISRDNSKNTLYLQMNSLRAEDTAVYYCAKLPFTFDDWGQGTLVTVSS

SEQ ID NO: 381 - protein, 116 aa, Artificial Sequence
  Description of Artificial Sequence: Synthetic polypeptide
EVQLLESGGGLVQPGGSLRLSCAASGFTFRDYEMWWVRQAPGKGLERVSAINPWGTLTYYADSVKGRFTISRDNSRNTLYLQMNSLRAEDTAVYYCAKLPFTFDDWGQGTLVTVSS

SEQ ID NO: 382 - protein, 116 aa, Artificial Sequence
  Description of Artificial Sequence: Synthetic polypeptide
EVQLLESGGGLVQPGGSLRLSCAASGFTFRDYEMWWVRQAPGKGLERVSAINPNGRLTYYADSVKGRFTISRDNSKNTLYLQMNSLRAEDTAVYYCAKLPFTFADWGQGTLVTVSS

SEQ ID NO: 383 - protein, 116 aa, Artificial Sequence
  Description of Artificial Sequence: Synthetic polypeptide
EVQLLESGGGLVQPGGSLRLSCAASGFTFRDYEMWWVRQAPGKGLERVSAINPWGQLTYYADSVKGRFTISRDNSKNTLYLQMNSLRAEDTAVYYCAKLPFTFDDWGQGTLVTVSS

SEQ ID NO: 384 - protein, 116 aa, Artificial Sequence
  Description of Artificial Sequence: Synthetic polypeptide
EVQLLESGGGLVQPGGSLRLSCAASGFTFRDYEMWWVRQAPGKGLERVSAINPHGGLTYYADSVKGRFTISRDNSKNTLYLQMNSLRAEDTAVYYCAKLPFTFDDWGQGTLVTVSS

SEQ ID NO: 385 - protein, 116 aa, Artificial Sequence
  Description of Artificial Sequence: Synthetic polypeptide
EVQLLESGGGLVQPGGSLRLSCAASGFTFRDYEMWWVRQAPGKGLERVSAINPAGMLTYYADSVKGRFTISRDNSKNTLYLQMNSLRAEDTAVYYCAKLPFTFDDWGQGTLVTVSS

SEQ ID NO: 386 - protein, 116 aa, Artificial Sequence
  Description of Artificial Sequence: Synthetic polypeptide
EVQLLESGGGLVQPGGSLRLSCAASGFTFRDYEMWWVRQAPGKGLERVSAINPHGTLTYYADSVKGRFTISRDNSKNTLYLQMNSLRAEDTAVYYCAKLPFTFEDWGQGTLVTVSS

SEQ ID NO: 387 - protein, 116 aa, Artificial Sequence
  Description of Artificial Sequence: Synthetic polypeptide
EVQLLESGGGLVQPGGSLRLSCAASGFTFRDYEMWWVRQAPGKGLERVSAINPWGSLTYYADSVKGRFTISRDNSKNTLYLQMNSLRAEDTAVYYCAKLPFTFDDWGQGTLVTVSS

SEQ ID NO: 388 - protein, 116 aa, Artificial Sequence
  Description of Artificial Sequence: Synthetic polypeptide
EVQLLESGGGLVQPGGSLRLSCAASGFTFRDYEMWWVRQAPGKGLERVSAINPYGGLTYYADSVKGRFTISRDNSKNTLYLQMNSLRAEDTAVYYCAKLPFTFEDWGQGTLVTVSS

SEQ ID NO: 389 - protein, 116 aa, Artificial Sequence
  Description of Artificial Sequence: Synthetic polypeptide
EVQLLESGGGLVQPGGSLRLSCAASGFTFRDYEMWWVRQAPGKGLERVSAINPAGFLTYYADSVKGRFTISRDNSKNTLYLQMNSLRAEDTAVYYCAKLPFTFEDWGQGTLVTVSS

SEQ ID NO: 390 - protein, 116 aa, Artificial Sequence
  Description of Artificial Sequence: Synthetic polypeptide
EVQLLESGGGLVRPGGSLRLSCAASGFTFRDYEMWWVRQAPGKGLERVSAINPYGGLTYYADSVKGRFTISRDNSKNTLYLQMNSLRAEDTAVYYCAKLPFTFEDWGQGTLVTVSS

SEQ ID NO: 391 - protein, 116 aa, Artificial Sequence
  Description of Artificial Sequence: Synthetic polypeptide
EVQLLESGGGLVQPGGSLRLSCAASGFTFRDYEMWWVRQAPGKGLERVSAINPWGGFTYYADSVKGRFTISRDNSKNTLYLQMNSLRAEDTAVYYCAKLPFTFEDWGQGTLVTVSS

SEQ ID NO: 392 - protein, 116 aa, Artificial Sequence
  Description of Artificial Sequence: Synthetic polypeptide
EVQLLESGGGLVQPGGSLRLSCAASGFTFRDYEMWWVRQAPGKGLERVSAINPWGGLTYYADSVKGRFTISRDNSKNTLYLQMNSLRAEDTAVYYCAKLPFTFDDWGQGTLVTVSS

SEQ ID NO: 393 - protein, 116 aa, Artificial Sequence
  Description of Artificial Sequence: Synthetic polypeptide
EVQLLESGGGLVQPGGSLRLSCAASGFTFRDYEMWWVRQAPGKGLERVSAINPYGGLTYYADSVKGRFTISRDNSKNTLYLQMDSLRAEDTAVYYCAKLPFTFEDWGQGTLVTVSS

SEQ ID NO: 394 - protein, 116 aa, Artificial Sequence
  Description of Artificial Sequence: Synthetic polypeptide
EVQLLESGGGLVQPGGSLRLSCAASGFTFRDYEMWWVRQAPGKGLERVSAINPWGTLTYYADSVKGRFTISRDNSKNTLYLQMNSLRAEDTAVYYCAKLPFTFEDWGQGTLVTVSS

SEQ ID NO: 395 - protein, 116 aa, Artificial Sequence
  Description of Artificial Sequence: Synthetic polypeptide
EVQLLESGGGLVQPGGSLRLSCAASGFTFRDYEMWWVRQAPGKGLERVSAINPWGGYTYYADSVKGRFTISRDNSKNTLYLQMNSLRAEDTAVYYCAKLPFTFEDWGRGTLVTVSS

SEQ ID NO: 396 - protein, 116 aa, Artificial Sequence
  Description of Artificial Sequence: Synthetic polypeptide
EVQLLESGGGLVQPGGSLRLSCAASGFTFRDYEMWWVRQAPGKGLERVSAINPYGNLTYYADSVKGRFTISRDNSKNTLYLQMNSLRAEDTAVYYCAKLPFTFDDWGQGTLVTVSS

SEQ ID NO: 397 - protein, 116 aa, Artificial Sequence
  Description of Artificial Sequence: Synthetic polypeptide
EVQLLESGGGLVQPGGSLRLSCAASGFTFRDYEMWWVRQAPGKGLERVSAINPHGGFTYYADSVKGRFTISRDNSKNTLYLQMNSLRAEDTAVYYCAKLPFTFEDWGQGTLVTVSS

SEQ ID NO: 398 - protein, 116 aa, Artificial Sequence
  Description of Artificial Sequence: Synthetic polypeptide
EVQLLESGGGLVQPGGSLRLSCAASGFTFRDYEMWWVRQAPGKGLERVSAINPAGFYTYYADSVKGRFTISRDNSKNTLYLQMNSLRAEDTAVYYCAKLPFTFDDWGQGTLVTVSS

SEQ ID NO: 399 - protein, 116 aa, Artificial Sequence
  Description of Artificial Sequence: Synthetic polypeptide
EVQLLESGGGLVQPGGSLRLSCAASGFTFRDYEMWWVRQAPGKGLERVSAINPAGGLTYYADSVKGRFTISRDNSKNTLYLQMNSLRAEDTAVYYCAKLPFTFDDWGQGTLVTVSS

SEQ ID NO: 400 - protein, 116 aa, Artificial Sequence
  Description of Artificial Sequence: Synthetic polypeptide
EVQLLESGGGLVQPGGSLRLSCAASGFAFRDYEMWWVRQAPGKGLERVSAINPHGSLTYYADSVKGRFTISRDNSKNTLYLQMNSLRAEDTAVYYCAKLPFTFEDWGQGTLVTVSS

SEQ ID NO: 401 - protein, 116 aa, Artificial Sequence
  Description of Artificial Sequence: Synthetic polypeptide
EVQLLESGGGLVQPGGSLRLSCAASGFTFRDYEMWWVRQAPGKGLERVSAINPAGGYTYYADSVKGRFTISRDNSKNTLYLQMNSLRAEDTAVYHCAKLPFTFEDWGQGTLVTVSS

SEQ ID NO: 402 - protein, 116 aa, Artificial Sequence
  Description of Artificial Sequence: Synthetic polypeptide
EVQLLESGGGLVQPGGSLRLSCAASGFTFRDYEMWWVRQAPGKGLERVSAINPQGTRTYYADSVKGRFTISRDNSKNTLYLQMNSLRAEDTAVYYCAKLPFWFTEWGQGTLVTVSS

SEQ ID NO: 403 - protein, 116 aa, Artificial Sequence
  Description of Artificial Sequence: Synthetic polypeptide
EVQLLESGGGLVQPGGSLRLSCAASGFTFRDYEMWWVRQAPGKGLERVSAINPQGTRTYYADSVKGRFTISRDNSKNTLYLQMNSLRAEDTAVYYCAKLPFMFSDRGQGTLVTVSS

SEQ ID NO: 404 - protein, 116 aa, Artificial Sequence
  Description of Artificial Sequence: Synthetic polypeptide
EVQLLESGGGLVQPGGSLRLSCAASGFTFRDYEMWWVRQAPGKGLERVSAINPQGTRTYYADSVKGRFTISRDNSKNTLYLQMNSLRAEDTAVYYCAKLPFLFQEWGQGTLVTVSS

SEQ ID NO: 405 - protein, 116 aa, Artificial Sequence
  Description of Artificial Sequence: Synthetic polypeptide
EVQLLESGGGLVQPGGSLRLSCAASGFTFRDYEMWWVRQAPGKGLERVSAINPQGTRTYYADSVKGRFTISRDNSKNTLYLQMNSLRAEDTAVYYCAKLPTRFEDWGQGTLVTVSS

SEQ ID NO: 406 - protein, 116 aa, Artificial Sequence; identical to SEQ ID NO: 10
  Description of Artificial Sequence: Synthetic polypeptide

SEQ ID NO: 407 - protein, 116 aa, Artificial Sequence
  Description of Artificial Sequence: Synthetic polypeptide
EVQLLESGGGLVQPGGSLRLSCAASGFTFRDYEMWWVRQAPGKGLERVSAINPQGTRTYYADSVKGRFTISRDNSKNTLYLQMNSLRAEDTAVYYCGKEPFRYDYWGQGTLVTVSS

SEQ ID NO: 408 - protein, 116 aa, Artificial Sequence
  Description of Artificial Sequence: Synthetic polypeptide
EVQLLESGGGLVQPGGSLRLSCAASGFTFRDYEMWWVRQAPGKGLERVSAINPQGTRTYYADSVKGRFTISRDNSKNTLYLQMNSLRAEDTAVYYCAKLPTFFKDWGQGTLVTVSS

SEQ ID NO: 409 - protein, 116 aa, Artificial Sequence
  Description of Artificial Sequence: Synthetic polypeptide
EVQLLESGGGLVQPGGSLRLSCAASGFTFRDYEMWWVRQAPGKGLERVSAINPQGTRTYYADSVKGRFTISRDNSKNTLYLQMNSLRAEDTAVYYCAKLPFFFQEWGQGTLVTVSS

SEQ ID NO: 410 - protein, 116 aa, Artificial Sequence
  Description of Artificial Sequence: Synthetic polypeptide
EVQLLESGGGLVQPGGSLRLSCAASGFTFRDYEMWWVRQAPGKGLERVSAINPQGTRTYYADSVKGRFTISRDNSKNTLYLQMNSLRAEDTAVYYCAKLPQLFHDRGQGTLVTVSS

SEQ ID NO: 411 - protein, 116 aa, Artificial Sequence
  Description of Artificial Sequence: Synthetic polypeptide
EVQLLESGGGLVQPGGSLRLSCAASGFTFRDYEMWWVRQAPGKGLERVSAINPQGTRTYYADSVKGRFTISRDNSKNTLYLQMNSLRAEDTAVYYCAKLPQLFEDWGQGTLVTVSS

SEQ ID NO: 412 - protein, 116 aa, Artificial Sequence
  Description of Artificial Sequence: Synthetic polypeptide
EVQLLESGGGLVQPGGSLRLSCAASGFTFRDYEMWWVRQAPGKGLERVSAINPQGTRTYYADSVKGRFTISRDNSKNTLYLQMNSLRAEDTAVYHCAKLPFGFSEWGQGTLVTVSS

SEQ ID NO: 413 - protein, 116 aa, Artificial Sequence
  Description of Artificial Sequence: Synthetic polypeptide
EVQLLESGGGLVQPGGSLRLSCAASGFTFRDYEMWWVRQAPGKGLERVSAINPQGTRTYYADSVKGRFTISRDNSKNTLYLQMNSLRAEDTAVYYCAKLPQLFQDWGQGTLVTVSS

SEQ ID NO: 414 - protein, 116 aa, Artificial Sequence
  Description of Artificial Sequence: Synthetic polypeptide
EVQLLESGGGLVQPGGSLRLSCAASGFTFRDYEMWWVRQAPGKGLERVSAINPQGTRTYYADSVKGRFTISRDNSKNTLYLQMNSLRAEDTAVYYCAKLPFFFHEWGQGTLVTVSS

SEQ ID NO: 415 - protein, 116 aa, Artificial Sequence
  Description of Artificial Sequence: Synthetic polypeptide
EVQLLESGGGLVQPGGSLRLSCAASGFTFRDYEMWWVRQAPGKGLERVSAINPQGTRTYYADSVKGRFTISRDNSKNTLYLQMNSLRAEDTAVYYCAKLPHYFKDWGQGTLVTVSS

SEQ ID NO: 416 - protein, 116 aa, Artificial Sequence
  Description of Artificial Sequence: Synthetic polypeptide
EVQLLESGGGLVQSGGSLRLSCAASGFTFRDYEMWWVRQAPGKGLERVSAINPQGTRTYYADSVKGRFTISRDNSKNTLYLQMNSLRAEDTAVYYCAKLPFYFEEWGQGTLVTVSS

SEQ ID NO: 417 - protein, 116 aa, Artificial Sequence
  Description of Artificial Sequence: Synthetic polypeptide
EVQLLESGGGLVQPGGSLRLSCAASGFTFRDYEMWWVRQAPGKGLERVSAINPQGTRTYYADSVKGRFTISRDNSKNTLYLQMNSLRAEDTAVYYCAKLPFRFSDRGQGTLVTVSS

SEQ ID NO: 418 - protein, 116 aa, Artificial Sequence
  Description of Artificial Sequence: Synthetic polypeptide
EVQLLESGGGLVQPGGSLRLSCAASGFTFRDYEMWWVRQAPGKGLERVSAINPQGTRTYYADSVKGRFTISRDNSKNTLYLQMNSLRAEDTAVYYCAKLPTLFQDWGQGTLVTVSS

SEQ ID NO: 419 - protein, 116 aa, Artificial Sequence
  Description of Artificial Sequence: Synthetic polypeptide
EVQLLESGGGLVQPGGSLRLSCAASGFTFRDYEMWWVRQAPGKGLERVSAINPQGTRTYYADSVKGRFTISRDNSKNTLYLQMNSLRAEDTAVYYCAKLPFYFSEWGQGTLVTVSN

SEQ ID NO: 420 - protein, 116 aa, Artificial Sequence
  Description of Artificial Sequence: Synthetic polypeptide
EVQLLESGGGLVQPGGSLRLSCAASGFTFRDYEMWWVRQAPGKGLERVSAINPQGTRTYYADSVKGRFTISRDNSKNTLYLQMNSLRAEDTAVYYCAKLPFWFQEWGQGTLVTVSS

SEQ ID NO: 421 - protein, 116 aa, Artificial Sequence
  Description of Artificial Sequence: Synthetic polypeptide
EVQLLESGGGLVQPGGSLRLSCAASGFTFRDYEMWWVRQAPGKGLERVSAINPWGSLTYYADSVKGRFTISRDNSKNTLYLQMNSLRAEDTAVYYCAKLPFYFQEWGQGTLVTVSS

SEQ ID NO: 422 - protein, 116 aa, Artificial Sequence
  Description of Artificial Sequence: Synthetic polypeptide
EVQLLESGGGLVQPGGSLRLSCAASGFTFRDYEMWWVRQAPGKGLERVSAINPWGSLTYYADSVKGRFTISRDNSKNTLYLQMNSLRAEDTAVYHCAKLPMFFEDWGQGTLVTVSN

SEQ ID NO: 423 - protein, 116 aa, Artificial Sequence
  Description of Artificial Sequence: Synthetic polypeptide
EVQLLESGGGLVQPGGSLRLSCAASGFTFRDYEMWWVRQAPGKGLERVSAINPWGSLTYYADSVKGRFTISRDNSKNTLYLQMNSLRAEDTAVYYCAKLPFYFHEWGQGTLVTVSS

SEQ ID NO: 424 - protein, 116 aa, Artificial Sequence
  Description of Artificial Sequence: Synthetic polypeptide
EVQLLESGGGLVQPGGSLRLSCAASGFTFRDYEMWWVRQAPGKGLERVSAINPWGSLTYYADSVKGRFTISRDNSKNTLYLQMNSLRAEDTAVYYCAKLPFFFQEWGQGTLVTVSS

SEQ ID NO: 425 - protein, 116 aa, Artificial Sequence
  Description of Artificial Sequence: Synthetic polypeptide
EVQLLESGGGLVQPGGSLRLSCAASGFTFRDYEMWWVRQAPGKGLERVSAINPWGSLTYYADSVKGRFTISRDNSKNTLYLQMNSLRAEDTAVYYCAKLPFFFHEWGQGTLVTVSS

SEQ ID NO: 426 - protein, 116 aa, Artificial Sequence
  Description of Artificial Sequence: Synthetic polypeptide
EVQLLESGGGLVQPGGSLRLSCAASGFTFRDYEMWWVRQAPGKGLERVSAINPWGGFTYYADSVKGRFTISRDNSKNTLYLQMNSLRAEDTAVYYCAKLPFYFQEWGQGTLVTVSS

SEQ ID NO: 427 - protein, 116 aa, Artificial Sequence
  Description of Artificial Sequence: Synthetic polypeptide
EVQLLESGGGLVQPGGSLRLSCAASGFTFRDYEMWWVRQAPGKGLERVSAINPWGGFTYYADSVKGRFTISRDNSKNTLYLQMNSLRAEDTAVYHCAKLPMFFEDWGQGTLVTVSN

SEQ ID NO: 428 - protein, 116 aa, Artificial Sequence
  Description of Artificial Sequence: Synthetic polypeptide
EVQLLESGGGLVQPGGSLRLSCAASGFTFRDYEMWWVRQAPGKGLERVSAINPWGGFTYYADSVKGRFTISRDNSKNTLYLQMNSLRAEDTAVYYCAKLPFYFHEWGQGTLVTVSS

SEQ ID NO: 429 - protein, 116 aa, Artificial Sequence
  Description of Artificial Sequence: Synthetic polypeptide
EVQLLESGGGLVQPGGSLRLSCAASGFTFRDYEMWWVRQAPGKGLERVSAINPWGGFTYYADSVKGRFTISRDNSKNTLYLQMNSLRAEDTAVYYCAKLPFFFQEWGQGTLVTVSS

SEQ ID NO: 430 - protein, 116 aa, Artificial Sequence
  Description of Artificial Sequence: Synthetic polypeptide
EVQLLESGGGLVQPGGSLRLSCAASGFTFRDYEMWWVRQAPGKGLERVSAINPWGGFTYYADSVKGRFTISRDNSKNTLYLQMNSLRAEDTAVYYCAKLPFFFHEWGQGTLVTVSS

SEQ ID NO: 431 - protein, 116 aa, Artificial Sequence
  Description of Artificial Sequence: Synthetic polypeptide
EVQLLESGGGLVQPGGSLRLSCAASGFTFRDYEMWWVRQAPGKGLERVSAINPWGGLTYYADSVKGRFTISRDNSKNTLYLQMNSLRAEDTAVYYCAKLPFYFQEWGQGTLVTVSS

SEQ ID NO: 432 - protein, 116 aa, Artificial Sequence
  Description of Artificial Sequence: Synthetic polypeptide
EVQLLESGGGLVQPGGSLRLSCAASGFTFRDYEMWWVRQAPGKGLERVSAINPWGGLTYYADSVKGRFTISRDNSKNTLYLQMNSLRAEDTAVYHCAKLPMFFEDWGQGTLVTVSN

SEQ ID NO: 433 - protein, 116 aa, Artificial Sequence
  Description of Artificial Sequence: Synthetic polypeptide
EVQLLESGGGLVQPGGSLRLSCAASGFTFRDYEMWWVRQAPGKGLERVSAINPWGGLTYYADSVKGRFTISRDNSKNTLYLQMNSLRAEDTAVYYCAKLPFYFHEWGQGTLVTVSS

SEQ ID NO: 434 - protein, 116 aa, Artificial Sequence
  Description of Artificial Sequence: Synthetic polypeptide
EVQLLESGGGLVQPGGSLRLSCAASGFTFRDYEMWWVRQAPGKGLERVSAINPWGGLTYYADSVKGRFTISRDNSKNTLYLQMNSLRAEDTAVYYCAKLPFFFQEWGQGTLVTVSS

SEQ ID NO: 435 - protein, 116 aa, Artificial Sequence
  Description of Artificial Sequence: Synthetic polypeptide
EVQLLESGGGLVQPGGSLRLSCAASGFTFRDYEMWWVRQAPGKGLERVSAINPWGGLTYYADSVKGRFTISRDNSKNTLYLQMNSLRAEDTAVYYCAKLPFFFHEWGQGTLVTVSS

SEQ ID NO: 436 - protein, 116 aa, Artificial Sequence
  Description of Artificial Sequence: Synthetic polypeptide
EVQLLESGGGLVQPGGSLRLSCAASGFTFRDYEMWWVRQAPGKGLERVSAINPQGTRTYYADSVKGRFTISRDNSKNTLYLQMNSLRAEDTAVYHCAKLPMFFEDWGQGTLVTVSS

SEQ ID NO: 437 - protein, 119 aa, Artificial Sequence
  Description of Artificial Sequence: Synthetic polypeptide
EVQLLETGGGLVQPGGSLRLSCAASGFTFSTYHMQWVRRAPGKGLEWVSMIDADGLGTYYADPVKGRFTISRDNSKNTLYLQMNSLRAKDTAVYYCARPGPQFGQFDYLGQGTLVTVSS

SEQ ID NO: 438 - protein, 119 aa, Artificial Sequence
  Description of Artificial Sequence: Synthetic polypeptide
EVQLFESGGGLVQTGGSLRLSCAASGFTFSTYHMQWVRQAPGKGLEWVSMIDADGLGKYYADPVKGRFTISRDNSKNTLYLQMNSLRAEDTAVYYCVKPGPQFGQYDYWGQGTLVTVSS

SEQ ID NO: 439 - protein, 121 aa, Artificial Sequence
  Description of Artificial Sequence: Synthetic polypeptide
EVQLLESGGGLVQPGGSLRLSCSASGFTFSGYDMQWVRQAPGKGLEWVSTISASGVYTYYADSVKGRFTISRDNSKNTLYLQMNSLRAEDTAVYYCAKYPNRFALNSFDYRGRGTLVTVSS

SEQ ID NO: 440 - protein, 121 aa, Artificial Sequence
  Description of Artificial Sequence: Synthetic polypeptide
EVQLLESGGGLVQPGGSLRLSCAASGFTFSGYDMQWVRQAPGRGLEWVSTISASGVYTYYTDSVKGRFTTSRDNSKNTLYLQMNSLRAEDTAVYYCTKYPNRFARNNFDYWGQGTLVTVSS

SEQ ID NO: 441 - protein, 108 aa, Artificial Sequence
  Description of Artificial Sequence: Synthetic polypeptide
DILMTQSPSSLSASVGDRVTITCRANSSILWALAWYQQKPGEAPKLLIESSSGLQSGVPSRFSGSGSGTDFTLTISSLQPEDFATYYCVQNAVWPGTFSQGTKVEIKR

SEQ ID NO: 442 - protein, 108 aa, Artificial Sequence
  Description of Artificial Sequence: Synthetic polypeptide
DIQMTQSPSSLSASVGDRVTITCRADSSILWALAWYQQKPGKAPKLLIESSSGLQSGVPSRFSGSGSGTDFTLTISSLQPEDFATYYCVQNAVWPGTFGQGTKVEIKR

SEQ ID NO: 443 - protein, 108 aa, Artificial Sequence
  Description of Artificial Sequence: Synthetic polypeptide
DIQMTVSPSSLSASVGDRVTITCRADSSILWALAWYQQKPGKAPKLLIESSSGLQSGVPSRFSGSGSGTDFTLTISSLQPEDFATYYCVQNAVWPGTFGQGTKVEIKR

SEQ ID NO: 444 - protein, 108 aa, Artificial Sequence
  Description of Artificial Sequence: Synthetic polypeptide
DIQMTQSPSSLSASVGDRVTITCRANSSILWALAWYQQKPGKAPKLLIESSSGLQSGVPSRFSGSGSGTDFTLTISSLQPEDFATYYCVQNAVWPGTFDQGTKVEIKR

SEQ ID NO: 445 - protein, 108 aa, Artificial Sequence
  Description of Artificial Sequence: Synthetic polypeptide
DIQMTQSPSSLSASVGDRVTITCRANSSILWALAWYQQKPGKAPKLLIESSTGLQSGVPSRFSGSGSGTDFTLTISSLQPEDFATYYCVQNAVWPGTFGQGTKVEIKR

SEQ ID NO: 446 - protein, 108 aa, Artificial Sequence
  Description of Artificial Sequence: Synthetic polypeptide
DIQMTVSPSSLSASVGDRVTITCRANSSILWALAWYQQKPGKAPKLLIESSSGLQSGVPSRFSGSGSGTDFTLTISSLQPEDFATYYCVQNAVWPGTFGQGTKVEIKR

SEQ ID NO: 447 - protein, 108 aa, Artificial Sequence
  Description of Artificial Sequence: Synthetic polypeptide
DIQMTQSPSSLSASVGDRVTITCRADSSILWALAWYQQKPGKAPKLLIESSSGLQSGVPSRFSGSGSGTDFTLTISSLQPEDFATYYCVQNAVWPGTFDQGTKVEIKR

SEQ ID NO: 448 - protein, 108 aa, Artificial Sequence
  Description of Artificial Sequence: Synthetic polypeptide
DIQMTQSPSSLSASVGDRVTITCRANSSILWALAWYQQKPGKAPELLIESSSGLQSGVPSRFSGSGSGTDFTLTISSLQPEDFATYYCVQNAVWPGTFGQGTKVEIKR

SEQ ID NO: 449 - protein, 108 aa, Artificial Sequence
  Description of Artificial Sequence: Synthetic polypeptide
DIQMTQSPSSLSASVGDRVTITCRANSSILWALAWYQQKPGKAPKLLIESSSGLQSGVPSRFSGSGSGTDFTLTISSLQPEDFATYYCVQNAVWPGTFGQGTKVENKR

SEQ ID NO: 450 - protein, 108 aa, Artificial Sequence
  Description of Artificial Sequence: Synthetic polypeptide
DIQMTQSPSSLSASVGDRVTITCRANSSILWALAWYQQKPGKAPKLLIESSSGLQSGVPSRFSGSGSGTDFTLTISSLQPEDFATYYCVQNAVWPGTFGQGTKVEIKR

SEQ ID NO: 451 - protein, 108 aa, Artificial Sequence
  Description of Artificial Sequence: Synthetic polypeptide
DIQMTQSPSSLSASVGDRVTITCRANSSILWALAWYQQKPGKAPKLLIESSSGLQSGIPSRFSGSGSGTDFTLTISSLQPEDFATYYCVQNAVWPGTFGQGTKVEIKR

SEQ ID NO: 452 - protein, 108 aa, Artificial Sequence; identical to SEQ ID NO: 450
  Description of Artificial Sequence: Synthetic polypeptide

SEQ ID NO: 453 - protein, 108 aa, Artificial Sequence
  Description of Artificial Sequence: Synthetic polypeptide
DILLTQSPSSLSASVGDRVTITCRANSSILWALAWYQQKPGKAPKLLIESSSGLQSGVPSRFSGSGSGTDFTLTISSLQPEDFATYYCVQNAVWPGTFGQGTKVEIKR

SEQ ID NO: 454 - protein, 108 aa, Artificial Sequence
  Description of Artificial Sequence: Synthetic polypeptide
DIQMTQSPSSLSASVGDRVTITCRANSSILWALAWYQQKPGKAPKLLIESSSGLQSGVPSRFSGSGTGTDFTLTISGLQPEDFATYYCVQNAVWPGTFDQGTKVEIKR

SEQ ID NO: 455 - protein, 108 aa, Artificial Sequence
  Description of Artificial Sequence: Synthetic polypeptide
DIQMTQSPSSLSASVGDRVTIPCRANSSILWALAWYQQKPGKAPKLLIESSSGLQSGVPSRFSGSASGTDFTLTISSLQPEDFATYYCVQNAVWPGTFGQGTKVEIKR

SEQ ID NO: 456 - protein, 108 aa, Artificial Sequence
  Description of Artificial Sequence: Synthetic polypeptide
DIQMAQSPSSLSASVGDRVTITCRASQTIERRLNWYQQKPGKAPKLLIYLASRLQSGVPSRFSGSGSGTDFTLTISSLQPEDFATYYCHQYASPPLTLGQGTKVEIKR

SEQ ID NO: 457 - protein, 108 aa, Artificial Sequence
  Description of Artificial Sequence: Synthetic polypeptide
DIQMTQSPSSLSASVGDSVTITCRASQTIERRLNWYQQKPGEAPKLLIYLASRLQSGVPSRFSGSGSGTDFTLTISSLQPEDFATYYCHQYASPPLTFGQGTNVEIKR

SEQ ID NO: 458 - protein, 108 aa, Artificial Sequence
  Description of Artificial Sequence: Synthetic polypeptide
DIQMTQSPSSLSASVGDRVTITCRASQTIERRLNWYQQKPGKAPKLLIYLASRLQSGVPSRFSGSGSGTDFTLTISSLQPEDFAAYYCHQYESPPLTFGQGTKVEIKR

SEQ ID NO: 459 - protein, 108 aa, Artificial Sequence
  Description of Artificial Sequence: Synthetic polypeptide
DIQMTQSPSSLSASVGDRVTITCRASRTIERRLNWYQQKPGKAPKLLIYLASRLQSGVPSRFSGSGSGTDFTLTISSLQPEDFATYYCHQYESPPLTFGQGTKVEIKR

SEQ ID NO: 460 - protein, 108 aa, Artificial Sequence
  Description of Artificial Sequence: Synthetic polypeptide
DIQMTQSPSSLSASVGERVTITCRASQTIERRLNWYQQKPGKAPKLLIYLASRLQSGVPSRFSGSGSGTDFTLTISNLQPEDSATYYCHQYASPPLTLGQGTKVEIKR

SEQ ID NO: 461 - protein, 108 aa, Artificial Sequence
  Description of Artificial Sequence: Synthetic polypeptide
DIQMTQSPSSLSASVGDRVTITCRASQTIERRLNWYQQKPGKAPKLLIYLASRLQSGVPSRFSGSGSGTDFTLTISSLQPEDFATYYCHQYASPPLTLGQGTKVEIKR

SEQ ID NO: 462 - protein, 108 aa, Artificial Sequence
  Description of Artificial Sequence: Synthetic polypeptide
DIQITQSPSSLSASVGDRVTITCRASQTIERRLNWYQQKPGKDPKLLIYLASRLQSGVPSRFSGSGSGTDFTLTISSLQPEDFATYYCHQYESPPLTFGQGTKVEIKR

SEQ ID NO: 463 - protein, 108 aa, Artificial Sequence
  Description of Artificial Sequence: Synthetic polypeptide
DIQMTQSPSSLSASVGDRVTITCRASQTIERRLNWYQQKPGEAPKLLIYLASRLQSGVPSRFSGSGSGTDFTLTISSLQPEDFATYYCHQYESPPLTFGQGTKVEIKW

SEQ ID NO: 464 - protein, 108 aa, Artificial Sequence
  Description of Artificial Sequence: Synthetic polypeptide
DIQLTQSPSSLSASVGDRVTITCRASQTIERRLNWYQQKPGKAPKLLIYLASRLQSGVPSRFSGSGSGTEFTLTISSLQPEDFATYYCHQYESPPLTFGQGTKVEIKR

SEQ ID NO: 465 - protein, 108 aa, Artificial Sequence
  Description of Artificial Sequence: Synthetic polypeptide
DIQMSQSPSTLSASVGDRVTITCRASQTIERRLNWYQQKPGKAPKLLIYLASRLQSGVPSRFSGSGSGTDFTLTISSLQPEDFATYYCHQYESPPLMFGQGTKVEIKR

SEQ ID NO: 466 - protein, 108 aa, Artificial Sequence
  Description of Artificial Sequence: Synthetic polypeptide
DIQMTQSPSSLSASVGDRVTITCRASQTIERRLNWYQQKPGKDPKLLIYLASRLQSGVPSRFSGSGSGTDFTLTISSLQPEDFATYYCHQYESPPLTFGQGTKVEIKR

SEQ ID NO: 467 - protein, 108 aa, Artificial Sequence
  Description of Artificial Sequence: Synthetic polypeptide
DIQMTQSPSSLSASVGDRVTITCRASQTIERRLNWYQQKPGKAPKLLIYLASRLQSGVPSRFSGSGSGTDFTLTISSLQPEDFATYYCHQYESPPLTFGQGTKVEIKR

SEQ ID NO: 468 - protein, 108 aa, Artificial Sequence
  Description of Artificial Sequence: Synthetic polypeptide
DIQMTQSPSSLFASVGDRVTITCRASQTIERRLNWYQQKPGKAPKLLIYLASRLQSGVPSRFSGSGSGTDFTLTISSLQPEDFATYYCHQYESPPLTFGQGTKVEIKR

SEQ ID NO: 469 - protein, 108 aa, Artificial Sequence
  Description of Artificial Sequence: Synthetic polypeptide
DIQMTQYPSSLSASVGDRVTITCRASQSIERRLNWYQQKPGEAPKLLIYLASRLQSGVPSRFSGSGSGTDFTLTISSLQPEDFATYYCHQYESPPLTFGQGTKVEIKR

SEQ ID NO: 470 - protein, 108 aa, Artificial Sequence
  Description of Artificial Sequence: Synthetic polypeptide
DIQMTQSPSSLSASVGDRVTITCRASRTIERRLNWYQQKPGKAPKLLIYLASRLQSGVPSRFSGSGSGTDFTLTISSLQPEDFATYYCHPYESPPLTFGQGTKVEIKR

SEQ ID NO: 471 - protein, 108 aa, Artificial Sequence
  Description of Artificial Sequence: Synthetic polypeptide
DIQMTQSPSSLSASVGDRVTITCRASQAIERRLNWYQQKPGKAPKLLIYLASRLQSGVPSRFSGSGSGTDFTLTISSLQPEDFATYYCHQYASPPLTLGQGTKVEIKR

SEQ ID NO: 472 - protein, 108 aa, Artificial Sequence
  Description of Artificial Sequence: Synthetic polypeptide
NIQMTQSPSSLSASVGDRVTITCRASQAIERRLNWYQQKPGKAPKLLIYLASRLQSGVPSRFSGSGSGTDFTLTISSLQPEDFATYYCHQYESPPLTFGQGTKVEIKR

SEQ ID NO: 473 - protein, 108 aa, Artificial Sequence
  Description of Artificial Sequence: Synthetic polypeptide
DIQMTQSPSSLSASVGDRVTITCRASQTIGRRLNWYQQKPGKAPKLLIYLASRLQSGVPSRFSGSGSGSDFTLTISSLQPEDFATYYCHQYESPPLTFGQGTKVEIKR

SEQ ID NO: 474 - protein, 108 aa, Artificial Sequence
  Description of Artificial Sequence: Synthetic polypeptide
DIQMTQSPSSLSASVGDRVTITCRASQTIERRLNWYQQKPGKAPKLLIYLASRLQSGVPSRFSGSGSGTEFTLTISSLQPEDFATYYCHQYESPPLTFGQGTKVEIKR

SEQ ID NO: 475 - protein, 108 aa, Artificial Sequence
  Description of Artificial Sequence: Synthetic polypeptide
DIQMTQTPSSLSASVGDRVTITCRASQTIERRLNWYQQKPGEAPKLLIYLASRLQSGVPSRFSGSGSGTDFTLTISSLQPEDFATYYCHQYESPPLTFGQGTKVKIKR

SEQ ID NO: 476 - protein, 108 aa, Artificial Sequence
  Description of Artificial Sequence: Synthetic polypeptide
DIQMTQSPSSLSASVGDSVTITCRASQTIERRLNWYQQKPGKAPKLLIYLASRLQSGVPSRFSGSGSGTDFTLTISSLQPEDFATYYCHQYESPPLTFGQGTKVEIKR

SEQ ID NO: 477 - protein, 108 aa, Artificial Sequence
  Description of Artificial Sequence: Synthetic polypeptide
HIQMTQSPSSLSASVGDRVTITCRASQTIERRLNWYQQKPGKAPKLLIYLASRLQSGVPSRFSGSGSGTDFTLTISSLQPEDFATYYCHQYESPPLTFGQGTKVEIKR

SEQ ID NO: 478 - protein, 108 aa, Artificial Sequence
  Description of Artificial Sequence: Synthetic polypeptide
DVQMTQSPSSLSASVGDRVTITCRASQTIERRLNWYQQKPGEAPKLLIYLTSRLQSGVPSRFSGSGSGTDFTLTISSLQPEDFATYYCHQYASPPLTFGQGTKVEIKR

SEQ ID NO: 479 - protein, 108 aa, Artificial Sequence
  Description of Artificial Sequence: Synthetic polypeptide
DIQMTQSPSSLSASVGDRVTITCRASQTIERRLNWYQQKPGKAPKLLIYLASRLQSGVPSRFSGSGSGTDFTLTISSLQPEDFATYYCHQYESPPLTFGQGTKVVIKR

SEQ ID NO: 480 - protein, 108 aa, Artificial Sequence
  Description of Artificial Sequence: Synthetic polypeptide
DIQMTQSPSSLSASVGDRVTITCRASQTIERRLNWYQQKPGKAPRLLIYLATRLQSGVPSRFSGSGSGTDFTLTISSLQPEDFATYYCHQYESPPLTFGQGTKVEIKR

SEQ ID NO: 481 - protein, 108 aa, Artificial Sequence
  Description of Artificial Sequence: Synthetic polypeptide
DIQMTQSPSSLSASVGDRVTITCRASQPIERRLNWYQQKPGKAPKLLIYLASRLQSGVPSRFSGSGSGTDFTLTISSLQPEDFATYYCHQYESPPLTFGQGTKVEIKR

SEQ ID NO: 482 - protein, 108 aa, Artificial Sequence
  Description of Artificial Sequence: Synthetic polypeptide
DIQMTQSPSSLSASVGDRVTITCRASQTIGRRLNWYQQKPGKAPKLLIYLASRLQSGVPSRFSGSGSGTDFTLTISSLQPEDFATYYCHQYESPPLTFGQGTKVEIKR

SEQ ID NO: 483 - protein, 108 aa, Artificial Sequence
  Description of Artificial Sequence: Synthetic polypeptide
DIQMTQSPSSLSASVGDRVTITCRASQSIERRLNWYQQKPGKAPKLLIYLASRLQSGVPSRFSGSGSGTDFTLTISSLQPEDFATYYCHQYESPPLTFGQGTKVEIIR

SEQ ID NO: 484 - protein, 108 aa, Artificial Sequence
  Description of Artificial Sequence: Synthetic polypeptide
DIQMTQSPSSLSASVGDRVTITCRASQTIERRLNWYQQKPGKAPKLLIYLATRLQSGVPSRFSGSGSGTDFTLTISSLQPEDFATYYCHQYESPPLTFGQGTKVEIKR

SEQ ID NO: 485 - protein, 108 aa, Artificial Sequence
  Description of Artificial Sequence: Synthetic polypeptide
DIQMTQSPSSLSASVGDRVTITCRASQSIERRLNWYQQKPGKAPKLLIYLASRLQSGVPSRFSGSGSGTDFTLTISSLQPEDFATYYCHQYESPPLTFGQGTKVEIKR

SEQ ID NO: 486 - protein, 108 aa, Artificial Sequence
  Description of Artificial Sequence: Synthetic polypeptide
DIQMTQSPSSLSASVGDRVTITCRASQTIERRLNWYQQKPGKAPRLLIYLATRLQSGVPSRFSGSGSGTDFTLTISSLQPEDFATYYCHQFEHPPLTFGQGTKVEIKR

SEQ ID NO: 487 - protein, 108 aa, Artificial Sequence
  Description of Artificial Sequence: Synthetic polypeptide
DIQMTQSPSSLSASVGDRVTITCRASFPIDRRLNWYQQKPGKAPRLLIYLATRLQSGVPSRFSGSGSGTDFTLTISSLQPEDFATYYCHQYESPPLTFGQGTKVEIKR

SEQ ID NO: 488 - protein, 108 aa, Artificial Sequence
  Description of Artificial Sequence: Synthetic polypeptide
DIQMTQSPSSLSASVGDRVTITCRASSTIGRRLNWYQQKPGKAPRLLIYLATRLQSGVPSRFSGSGSGTDFTLTISSLQPEDFATYYCHQYESPPLTFGQGTKVEIKR

SEQ ID NO: 489 - protein, 108 aa, Artificial Sequence
  Description of Artificial Sequence: Synthetic polypeptide
DIQMTQSPSSLSASVGDRVTITCRASSQIGRRLNWYQQKPGKAPRLLIYLATRLQSGVPSRFSGSGSGTDFTLTISSLQPEDFATYYCHQYESPPLTFGQGTKVEIKR

SEQ ID NO: 490 - protein, 108 aa, Artificial Sequence
  Description of Artificial Sequence: Synthetic polypeptide
DIQMTQSPSSLSASVGDRVTITCRASERIGRRLNWYQQKPGKAPRLLIYLATRLQSGVPSRFSGSGSGTDFTLTISSLQPEDFATYYCHQYESPPLTFGQGTKVEIKR

SEQ ID NO: 491 - protein, 108 aa, Artificial Sequence
  Description of Artificial Sequence: Synthetic polypeptide
DIQMTQSPSSLSASVGDRVTITCRASQQIGRRLNWYQQKPGKAPRLLIYLATRLQSGVPSRFSGSGSGTDFTLTISSLQPEDFATYYCHQYESPPLTFGQGTKVEIKR

SEQ ID NO: 492 - protein, 108 aa, Artificial Sequence
  Description of Artificial Sequence: Synthetic polypeptide
DIQMTQSPSSLSASVGDRVTITCRASQPIARRLNWYQQKPGKAPRLLIYLATRLQSGVPSRFSGSGSGTDFTLTISSLQPEDFATYYCHQYESPPLTFGQGTKVEIKR

SEQ ID NO: 493 - protein, 108 aa, Artificial Sequence
  Description of Artificial Sequence: Synthetic polypeptide
DIQMTQSPSSLSASVGDRVTITCRASGNIGRRLNWYQQKPGKAPRLLIYLATRLQSGVPSRFSGSGSGTDFTLTISSLQPEDFATYYCHQYESPPLTFGQGTKVEIKR

SEQ ID NO: 494 - protein, 108 aa, Artificial Sequence
  Description of Artificial Sequence: Synthetic polypeptide
DIQMTQSPSSLSASVGDRVTITCRASRNIDRRLNWYQQKPGKAPRLLIYLATRLQSGVPSRFSGSGSGTDFTLTISSLQPEDFATYYCHQYESPPLTFGQGTKVEIKR

SEQ ID NO: 495 - protein, 108 aa, Artificial Sequence
  Description of Artificial Sequence: Synthetic polypeptide
DIQMTQSPSSLSASVGDRVTITCRASQSIGRRLNWYQQKPGKAPRLLIYLATRLQSGVPSRFSGSGSGTDFTLTISSLQPEDFATYYCHQYESPPLTFGQGTKVEIKR

SEQ ID NO: 496 - protein, 108 aa, Artificial Sequence
  Description of Artificial Sequence: Synthetic polypeptide
DIQMTQSPSSLSASVGDRVTITCRASQNIGTRLNWYQQKPGKAPRLLIYLATRLQSGVPSRFSGSGSGTDFTLTISSLQPEDFATYYCHQYESPPLTFGQGTKVEIKR

SEQ ID NO: 497 - protein, 108 aa, Artificial Sequence
  Description of Artificial Sequence: Synthetic polypeptide
DIQMTQSPSSLSASVGDRVTITCRASEVIGRRLNWYQQKPGKAPRLLIYLATRLQSGVPSRFSGSGSGTDFTLTISSLQPEDFATYYCHQYESPPLTFGQGTKVEIKR

SEQ ID NO: 498 - protein, 108 aa, Artificial Sequence
  Description of Artificial Sequence: Synthetic polypeptide
DIQMTQSPSSLSASVGDRVTITCRASEAIGRRLNWYQQKPGKAPRLLIYLATRLQSGVPSRFSGSGSGTDFTLTISSLQPEDFATYYCHQYESPPLTFGQGTKVEIKR

SEQ ID NO: 499 - protein, 108 aa, Artificial Sequence
  Description of Artificial Sequence: Synthetic polypeptide
DIQMTQSPSSLSASVGDRVTITCRASTSIARRLNWYQQKPGKAPRLLIYLATRLQSGVPSRFSGSGSGTDFTLTISSLQPEDFATYYCHQYESPPLTFGQGTKVEIKR

SEQ ID NO: 500 - protein, 108 aa, Artificial Sequence
  Description of Artificial Sequence: Synthetic polypeptide
DIQMTQSPSSLSASVGDRVTITCRASLNIGRRLNWYQQKPGKAPRLLIYLATRLQSGVPSRFSGSGSGTDFTLTISSLQPEDFATYYCHQYESPPLTFGQGTKVEIKR

SEQ ID NO: 501 - protein, 108 aa, Artificial Sequence
  Description of Artificial Sequence: Synthetic polypeptide
DIQMTQSPSSLSASVGDRVTITCRASQTIERRLNWYQQKPGKAPRLLIYLSSKLQSGVPSRFSGSGSGTDFTLTISSLQPEDFATYYCHQYESPPLTFGQGTKVEIKR

SEQ ID NO: 502 - protein, 116 aa, Artificial Sequence
  Description of Artificial Sequence: Synthetic polypeptide
EVQLLESGGGLVQPGGSLRLSCAASGSTIAGYEMWWVRQAPGKGLERVSAISGSGGSTYYADSVKGRFTISRDDSKNTLYLQMNSLRAEDTAVYYCARDPYSFDYWGQGTLVTVSS

SEQ ID NO: 503 - protein, 116 aa, Artificial Sequence
  Description of Artificial Sequence: Synthetic polypeptide
EVQPLESGGGLVQPGGSLRLSCAASGFTFAGYEMWWVRQAPGKGLERISAISGSGGSTYYADSVKGRFTISRDDSKNTLYLQMNSLRAEDTAVYYCARDPYSFDYWGQGTLVTVSS

SEQ ID NO: 504 - protein, 116 aa, Artificial Sequence
  Description of Artificial Sequence: Synthetic polypeptide
EVQLLESGGGSVQPGGSLRLSCAATGSTFAGYEMWWVRQAPGKGLERVSAISGSGGSTYYADSVKGRFTISRDDSKNTLYLQMNSLRAEDTAVYYCARDPYSYDYWGQGTLVSVSS

SEQ ID NO: 505 - protein, 116 aa, Artificial Sequence
  Description of Artificial Sequence: Synthetic polypeptide
EVQLLESGGGLVQPGGSLRLSCAASGLTFAGYEMWWVRQAPGKGLERVSAISGSGGSTYYADSVKGRFTISRDDSKNTLYLQMNSLRAEDTAVYHCARDPYSFDYWGQGTLVTVSS

SEQ ID NO: 506 - protein, 116 aa, Artificial Sequence
  Description of Artificial Sequence: Synthetic polypeptide
EVQLLESGGGLVQPGGSLRLSCAASGFTFAGYEMWWVRQAPGKGLERVSAISGSGGSTYYADSVKGRFTISRDDSKNTLYLQMNSLRAEDTAVYHCAKEPYSYDYWGQGTLVTVSS

SEQ ID NO: 507 - protein, 116 aa, Artificial Sequence
  Description of Artificial Sequence: Synthetic polypeptide
EVQLLESGGGLVQPGGSLRLSCAASGSTFAGYEMWWVRQAPGKGLERVSAISGSGGSTYYADSVKGRFTISRDDSKNTLYLQMNSLRPEDTAVYYCVKDPYSFDYWGQGTLVTVSS

SEQ ID NO: 508 - protein, 116 aa, Artificial Sequence
  Description of Artificial Sequence: Synthetic polypeptide
EVQLLESGGGLVQPGGSLRLSCAASGSTIAGYEMWWVRQAPGKGLERVSAISGSGGSTYYADSVKGRFTISRDDSKNTLYLQMNSLRAEDTAVYYCARDPYSFDYWGQGTPVTVSS

SEQ ID NO: 509 - protein, 116 aa, Artificial Sequence
  Description of Artificial Sequence: Synthetic polypeptide
EVQLMESGGGLVQPGGSLRLSCAASGSTFAGYEMWWYRQAPGKGLERVSAISGSGRSTYYADSVKGRFTISRDDSKNTLYLQMNSLRAEDTAVYYCAKDPYSFDYWGQGTLVTVSS

SEQ ID NO: 510 - protein, 116 aa, Artificial Sequence
  Description of Artificial Sequence: Synthetic polypeptide
EVQLLESGGGLVQPGGSLRLSCAASGFTFAGYEMWWVRQAPGKGLERVSAISGSGGSTYYADSVKGRFTISRDDSKNTLYLQMNSLRAEDTAVYYCAKEPYSFDYWGQGTLVTVSS

SEQ ID NO: 511 - protein, 116 aa, Artificial Sequence
  Description of Artificial Sequence: Synthetic polypeptide
EVQLLESGGGLVQPGGSLRLSCAASGSTIAGYEMWWVRQAPGKGLERVSAISGSGGSTYYADSVKGRFTISRDDSKNTLYLQMNSLRAEDTAVYYCAKDPYSFDYWGQGTLVTVSS

SEQ ID NO: 512 - protein, 116 aa, Artificial Sequence
  Description of Artificial Sequence: Synthetic polypeptide
EVQLLESGGGLVQPGGSLRLSCAASGFTFAGYEMWWVRQAPGKGLERVSAISGSGGSTYYADSVKGRFTISRDDSKNTLYLQMNSLRAEDTAVYYCARDPYSFDYWGQGTLVSVSS

SEQ ID NO: 513 - protein, 116 aa, Artificial Sequence
  Description of Artificial Sequence: Synthetic polypeptide
EVQLLESGGGLVQPGGSLRLSCAASGFTIAGYEMWWVRQAPGKGLERVSAISGSGGSTYYADSVKGRFTISRDDSKNTLYLQMNSLRAEDTAVYYCAKDPYSFDYWGQGTLVTVSS

SEQ ID NO: 514 - protein, 116 aa, Artificial Sequence
  Description of Artificial Sequence: Synthetic polypeptide
EVQLLESGGGLVQPGGSLRLSCAASGFTFAGYEMWWVRQAPGKGLERVSAISGSGGSTYYADSVKGRFTITRDDSKNTLYLQMNSLRAEDTAVYYCAKEPYSFDYWGQGTLVTVSS

SEQ ID NO: 515 - protein, 116 aa, Artificial Sequence
  Description of Artificial Sequence: Synthetic polypeptide
EVQLLESGGGLVQPGGSLRLSCAASGFTFAGYEMWWFRQAPGKGLERVSAISGSGGSTYYADSVKGRFTISRDDTKNTLYLQMNSLRAEDTAVYYCAKDPYSFDYWRQGTLVTVSS

SEQ ID NO: 516 - protein, 116 aa, Artificial Sequence
  Description of Artificial Sequence: Synthetic polypeptide
EVQLLESGGGLVQPGGSLRLSCAASGSTFAGYEVWWVRQAPGKGLERVSAISGSGGSTYYADSVKGRFTISRDDSKNTLYLQMNSLRAEDTAVYYCARDPYSFDYWGQGTLVTVSS

SEQ ID NO: 517 - protein, 116 aa, Artificial Sequence
  Description of Artificial Sequence: Synthetic polypeptide
EVQLLESGGGLVQPGGSLRLSCAASGSTFAGYEMWWVRQAPGKGLERISAISGSGGSTYYADSVKGRFTISRDDSKNTLYLKMNSLRAEDTAVYYCAKDPYSFDYWGQGTLVTVSS

SEQ ID NO: 518 - protein, 116 aa, Artificial Sequence
  Description of Artificial Sequence: Synthetic polypeptide
EVQLLESGGGLVQPGGSLRLSCAASGFTFAGYEMWWVRQAPGKGLERVSAISGSGGSTYYADSVKGRFTISRDDSKNTLYLQMNSLRAEDTAVYYCARDPYSFDYWGQGTLVTVSS

SEQ ID NO: 519 - protein, 116 aa, Artificial Sequence
  Description of Artificial Sequence: Synthetic polypeptide
EVQLLESGGGLVQPGGSLRLSCAASGLTFAGYEMWWVRRAPGKGLERVAAISGSGGSTYYADSVKGRFTISRDDSKNTLYLQMNSLRAEDTAVYYCARDPYSFDYWGQGTLVTVSS

SEQ ID NO: 520 - protein, 116 aa, Artificial Sequence
  Description of Artificial Sequence: Synthetic polypeptide
EVQLLESGGGLVQPGGSLRLSCAASGFTFAGYELWWVRQAPGKGLERVSAISGSGGSTYYADSVKGRFTISRDDSKNTLYLQMNSLRAEDTAVYYCARDPYSFDYRGQGTLVTVSS

SEQ ID NO: 521 - protein, 116 aa, Artificial Sequence
  Description of Artificial Sequence: Synthetic polypeptide
EVQLLESGGGLVQPGGSLRLSCAAPGFTLAGYEMWWVRQAPGKGLERVSAISGSGGSTYYADSVKGRFTISRDDSKNTLYLQMNSLRAEDTAVYYCAKEPYSFDYWGQGTLVTVSS

SEQ ID NO: 522 - protein, 116 aa, Artificial Sequence
  Description of Artificial Sequence: Synthetic polypeptide
EVQLLESGGGLVQPGGSLRLSCAASGLTFAGYEMWWVRRAPGKGLERVSAISGSGGSTYYADSVKGRFTTSRDDSKNTLYLQMNSLRAEDTAVYYCARDPYSFDYWGRGTLVTVSS

SEQ ID NO: 523 - protein, 116 aa, Artificial Sequence
  Description of Artificial Sequence: Synthetic polypeptide
EVQLLESGGGLVQPGGSLRLSCAASGFTFAGYEMWWVRQAPGKGLERVSAISGSGGSTYYADSVKGRFTISRDDSKNTLYLQMNSLRAEDTAVYYCAKEPYSYDYWGHGTLVTVSS

SEQ ID NO: 524 - protein, 116 aa, Artificial Sequence
  Description of Artificial Sequence: Synthetic polypeptide
EVQPLESGGGLVQPGGSLRLSCAASGFTFAGYEMWWVRQAPGKGLERVSAISGSGGNTYYADSVKGRFTISRDDSKNTLYLQMNSLRAEDTGVYYCARDPYSFDYWGQGTLVTVSS

SEQ ID NO: 525 - protein, 116 aa, Artificial Sequence
  Description of Artificial Sequence: Synthetic polypeptide
EVQLLESGGGLVQPGGSLRLSCAASGFTFAGYEMWWVRQAPGKGLERVSAISGSGGSTYYADSVKGRFTISRDDSKNTLYLQMNSLRAEDTAVYYCAKEPYSFDSWGQGTLVTVSS

SEQ ID NO: 526 - protein, 116 aa, Artificial Sequence
  Description of Artificial Sequence: Synthetic polypeptide
EAQLLESGGGLVQPGGSLRLSCAASGLTFAGYEMWWVRQAPGKGLERVSAISGSGGSTYYADSVKGRFTISRDDSKNTLYLQMNSLRAEDTAVYYCARDPYSFDYWGQGTLVTVSS

SEQ ID NO: 527 - protein, 116 aa, Artificial Sequence
  Description of Artificial Sequence: Synthetic polypeptide
EVQLLESGGGLVQPGGSLRLSCAASGSTFAGYEMWWVRQAPGKGLERVSAISGSGGSTYYADSVKGRFSISRDDSKNTLYLQMNSLRAEDTAVYYCAKEPYSFDHWGQGTLVTVSS

SEQ ID NO: 528 - protein, 116 aa, Artificial Sequence
  Description of Artificial Sequence: Synthetic polypeptide
EVQLLESGGGLVQPGGSLRLSCAASGSTFAGYEMWWVRRAPGKGLERVSAISGSGGSTYYADSVKGRFTISRDDSKNTLYLQMNSLRAEDTAVYYCARDPYSFDYWGQGTLVTVSS

SEQ ID NO: 529 - protein, 116 aa, Artificial Sequence
  Description of Artificial Sequence: Synthetic polypeptide
EVQLLESGGGLVQPGGSLRLSCAASGFTFAGYEMWWFRQAPGKGLERVSAISGSGGSTYYADSVKGRFTISRDDSKNTLYLQMNSLRAEDTAVYYCAKDPYSFDNWGQGTLVTVSS

SEQ ID NO: 530 - protein, 116 aa, Artificial Sequence
  Description of Artificial Sequence: Synthetic polypeptide
EVQLLESGGGLVEPGGSLRLSCAASGFTFAGYEMWWVRQAPGKGLERVSAISGSGGSTYYADSVKGRFTISRDDSKNTLYLQMNSLRAEDTAVYYCAKEPYSFDHRGQGTLVTVSS

SEQ ID NO: 531 - protein, 116 aa, Artificial Sequence
  Description of Artificial Sequence: Synthetic polypeptide
EVQLLESGGGLVQPGGSLRLSCAASGYTFAGYEMWWVRQAPGKGLERVSAISGSGGSTYYADSVKGRFTISRDDSKNTLYLQMNSLRAEDTAVYYCAKEPYSFDHRGQGTLVTVSS

SEQ ID NO: 532 - protein, 116 aa, Artificial Sequence
  Description of Artificial Sequence: Synthetic polypeptide
EVQLLESGGGLVQPGGSLRLSCAASGFTFAGYEMWWVRQAPGKGLERVSAISGSGGSTYYADSVKGRFTISRDNSKNTLYLQMNSLRAEDTAVYHCAKEPYSYDYWGQGTLVTVSS

SEQ ID NO: 533 - protein, 116 aa, Artificial Sequence
  Description of Artificial Sequence: Synthetic polypeptide
EVQLLESGGGLVQPGGSLRLSCAASGFTFAGYEMWWFRQAPGKGLERVSAISGSGGSTYYADSVKGRFTISRDNSKNTLYLQMNSLRAEDTAVYYCAKDPYSFDNWGQGTLVTVSS

SEQ ID NO: 534 - protein, 116 aa, Artificial Sequence
  Description of Artificial Sequence: Synthetic polypeptide
EVQLLESGGGLVQPGGSLRLSCAASGFTFAGYEMWWVRQAPGKGLERVSAISGSGGSTYYADSVKGRFTISRDDSKNTLYLQMNSLRAEDTAVYYCAKEPYSYDYWGQGTLVTVSS

SEQ ID NO: 535 - protein, 116 aa, Artificial Sequence
  Description of Artificial Sequence: Synthetic polypeptide
EVQLLESGGGLVQPGGSLRLSCAASGFTFAGYEMWWVRQAPGKGLERVSAISGSGGSTYYADSVKGRFTISRDDSKNTLYLQMNSLRAEDTAVYYCAKDPYSFDNWGQGTLVTVSS

SEQ ID NO: 536 - protein, 116 aa, Artificial Sequence
  Description of Artificial Sequence: Synthetic polypeptide
EVQLLESGGGLVQPGGSLRLSCAASGFTFAGYEMWWVRQAPGKGLEWVSAISGSGGSTYYADSVKGRFTISRDDSKNTLYLQMNSLRAEDTAVYHCAKEPYSYDYWGQGTLVTVSS

SEQ ID NO: 537 - protein, 116 aa, Artificial Sequence
  Description of Artificial Sequence: Synthetic polypeptide
EVQLLESGGGLVQPGGSLRLSCAASGFTFAGYEMWWFRQAPGKGLEWVSAISGSGGSTYYADSVKGRFTISRDDSKNTLYLQMNSLRAEDTAVYYCAKDPYSFDNWGQGTLVTVSS

SEQ ID NO: 538 - protein, 116 aa, Artificial Sequence
  Description of Artificial Sequence: Synthetic polypeptide
EVQLLESGGGLVQPGGSLRLSCAASGFTFAGYELWWVRQAPGKGLERVSAISGSGGSTYYADSVKGRFTISRDDSKNTLYLQMNSLRAEDTAVYYCAKDPYSFDYRGQGTLVTVSS

SEQ ID NO: 539 - protein, 116 aa, Artificial Sequence
  Description of Artificial Sequence: Synthetic polypeptide
EVQLLESGGGLVQPGGSLRLSCAASGFTFAGYELWWVRQAPGKGLERVSAISGSGGSTYYADSVKGRFTISRDDSKNTLYLQMNSLRAEDTAVYYCARDPYSFDYWGQGTLVTVSS

SEQ ID NO: 540 - protein, 120 aa, Artificial Sequence
  Description of Artificial Sequence: Synthetic polypeptide
EVQLLESGGGLVQPGGSLRLSCAASGFTFPTAEMLWVRKAPGKGLEWVSSISASGGSTYYADSVKGRFTISRDNSKNTLYLQMNSLRAEDTAVYYCAKEPVSYVATFDYWGQGTLVTVSS

SEQ ID NO: 541 - protein, 120 aa, Artificial Sequence
  Description of Artificial Sequence: Synthetic polypeptide
EVQLLVSGGGLVQPGGSLRLSCAASGFTFPTAEMLWVRQAPGKGPEWVSSISASGGSTYYADSVKGRFTISRDNSKNTLYLQMNSLRAEDTAVYYCAKEPVSYVATFDYWGQGTLVTVSS

SEQ ID NO: 542 - protein, 120 aa, Artificial Sequence
  Description of Artificial Sequence: Synthetic polypeptide
EVQLLESGGGLVQPGGSLRLSCAASGFTFPTAEMVWVRKAPGMGLEWVSSISASGGYTYYADSVKGRFTISRDNSKNMLYLQMNSLRAEDTAVYYCAKEPVSYVATFDYWGQGALVTVTS

SEQ ID NO: 543 - protein, 120 aa, Artificial Sequence
  Description of Artificial Sequence: Synthetic polypeptide
EVQLLVSGGGLVQPGGSLRLSCAASGFTFPTAEMVWVRQAPGKGLEWVSSISASGGSTYYADSVKGRFSISRDDSKNTLYLQMNSLRAEDTAVYYCAKEPVSYVATFDYWGHGALVTVSS

SEQ ID NO: 544 - protein, 120 aa, Artificial Sequence
  Description of Artificial Sequence: Synthetic polypeptide
EVQLLESGGGLVQPGGSLRLSCAASGFTFPTAEMLWVRQAPGKGLEWVSSISASGGSTYYADSVKGRFTISRDNSKNTLYLQMNSLRAEDTAVYYCAKEPVSYVATFDYWGQGTLVTVSS

SEQ ID NO: 545 - protein, 120 aa, Artificial Sequence
  Description of Artificial Sequence: Synthetic polypeptide
EAQLLESGGGLVQPGGSLRLSCAASGFTFPTAEMVWVRQAPGKGLEWISSISASGGSTYYADSVKGRFTISRDNSKNTLYLQLNSLRAEDTAVYYCAKEPVSYVATFDYWGRGTLVTVSS

SEQ ID NO: 546 - protein, 120 aa, Artificial Sequence
  Description of Artificial Sequence: Synthetic polypeptide
EVQLLESGGGLVQPGGSLRLSCAASGFTFPTAEMLWVRQAPGKGLEWVSSISASGGSTYYADSVKGRFTISRDNSKSTLYLQMNSLRAEDTAVYYCAKEPVSYVATFDYWGPGALVTVSS

SEQ ID NO: 547 - protein, 120 aa, Artificial Sequence
  Description of Artificial Sequence: Synthetic polypeptide
EVQLLESGGGLVQPGGSLRLSCAASGFTFPTAEMLWVRKAPGKGLEWVSSISASGGSTYYADSVKGRFTISRDNSKNTLFLQMNSLRAEDTAVYYCAKEPVSYVATFDYWGQGTLVTVSS

SEQ ID NO: 548 - protein, 120 aa, Artificial Sequence
  Description of Artificial Sequence: Synthetic polypeptide
EVQLLESGGGLVQPGGSLRLSCAASGFTFPTAEMLWVRQAPGKGLEWVSSISASGGSTYYADSVKGRFTISRDNSKNTLYLQMNSLRAEDTAVYYCAKEPVSYVATFDYWGPGALVTVSS

SEQ ID NO: 549 - protein, 120 aa, Artificial Sequence
  Description of Artificial Sequence: Synthetic polypeptide
EVQLLESGGGLVQPGGSLRLSCAASGFTFPTAEMLWVRQAPGKGLEWVSSISASGGSTYYADSVKGRFTISRDNSKNTLYLQMNSLRAEDTAVYYCAKEPVYYVATFDYWGQGTLVTVSS

SEQ ID NO: 550 - protein, 120 aa, Artificial Sequence
  Description of Artificial Sequence: Synthetic polypeptide
EVQLLESGGGLVQPGGSLRLSCAASGFTFPTAEMLWVRKAPGKGLEWVSSISASGGSTYYADSVKGRFTISRDNSKNTLYLQMNSLRAEDAAVYYCAKEPVSYVATFDYWGQGTLVTVSS

SEQ ID NO: 551 - protein, 108 aa, Artificial Sequence
  Description of Artificial Sequence: Synthetic polypeptide
NIQMTQSPSSLSASVGDRVTITCRASHFIGTLLTWYQHKPGKAPKLLITYGSLLQSGVPSRFSGSGSGTDFTLTISSLQPEDFATYYCGQGVLWPATFGQGTKVEIKR

SEQ ID NO: 552 - protein, 108 aa, Artificial Sequence
  Description of Artificial Sequence: Synthetic polypeptide
DIQMTQSPSSLSASVGDRVTITCRASHFIGTLLSWYQQKPRKAPKLLITYGSLLQSGVPSRFSGSGSGTDFTLTISSLHPEDFATYYCGQGVLWPPTFGQGTKVEIKR

SEQ ID NO: 553 - protein, 108 aa, Artificial Sequence
  Description of Artificial Sequence: Synthetic polypeptide
DIQMTQSPSSLTASVGDRVTITCRASHFIGTLLSWYQQKPGKAPKLLVTYGSLLQSGVPSRFSGSGSGTDFTLTISNLQPEDFATYYCGQGVLWPPTFGQGTKVENIR

SEQ ID NO: 554 - protein, 108 aa, Artificial Sequence
  Description of Artificial Sequence: Synthetic polypeptide
DIQMTQSPSSLSASVGDRVTITCRASHFIATLLSWYQQKPGKAPKLLITYGSLLQSGVPSRFSGSGSGTDFTLTISSLQPEDFATYYCGQGVLWPPTFGQGTKVEIKR

SEQ ID NO: 555 - protein, 108 aa, Artificial Sequence
  Description of Artificial Sequence: Synthetic polypeptide
DIQMTQSPSFLSASVGDRVTITCRASHFIATLLSWYQQKPGKAPKLLITYGSLLQSGVPSRFSGSGSGTDFTLTISSLQPEDFATYYCGQGVLWPPTFGQGTKVEIKR

SEQ ID NO: 556 - protein, 108 aa, Artificial Sequence
  Description of Artificial Sequence: Synthetic polypeptide
DIQMTQSPSSLSASVGDRVTITCRASHFIGTLLSWYQQKPGKATKLLITYGSLLQSGVPSRFSGSGSGTDFTLTISSLQPEDFATYYCGQGVLWPPTFGQGTKVEIKR

SEQ ID NO: 557 - protein, 108 aa, Artificial Sequence
  Description of Artificial Sequence: Synthetic polypeptide
DIQMTQSPSSLSASVGDRVTITCRASHFIGSLLSWYQHKPGKAPKLLITYGSLLQSGVPSRFSGSGSGTDFTLTISSLQPEDFATYYCGQGVLWPATFGQGTKVEIKR

SEQ ID NO: 558 - protein, 108 aa, Artificial Sequence
  Description of Artificial Sequence: Synthetic polypeptide
DIQMTQSPSSLSASVGDRVTITCRASHFIGTLLSWYQHKPGKAPKLLITYGSLLQSGVPSRFSGSGSGTDFTLTISSLQPEDFATYYCGQGVLWPATFGQGTKVEIKR

SEQ ID NO: 559 - protein, 108 aa, Artificial Sequence
  Description of Artificial Sequence: Synthetic polypeptide
DIQMTQSPSSLSASVGDRVTITCRASHFIGTLLSWYQHKPGKAPKLLITYGSMLQSGVPSRFSGSGSGTDFTLTISSLQPEDFATYYCGQGVLWPATFGQGTKVEIKR

SEQ ID NO: 560 - protein, 108 aa, Artificial Sequence
  Description of Artificial Sequence: Synthetic polypeptide
DIQMTQSPSSLSASVGDRVTITCRASHFIGTLLSWYQHKPGKAPKLLITYGSLLQSGVPSRFSGSGSGTEFTLTISSLQPEDFATYYCGQGVLWPATFGQGTKVEIKR

SEQ ID NO: 561 - protein, 108 aa, Artificial Sequence
  Description of Artificial Sequence: Synthetic polypeptide
DIQMTQSPSSLTASVGDRVTITCRASHFIGTLLSWYQHKPGKAPKLLITYGSLLQSGVPSRFSGSGSGTEFTLTISSLQPEDFATYYCGQGVLWPATFGQGTKVEIKR

SEQ ID NO: 562 - protein, 108 aa, Artificial Sequence
  Description of Artificial Sequence: Synthetic polypeptide
NIQMTQSPSSLSASVGDRVTITCRASHFIGTLLSWYQHKPGKAPKLLITYGSLLQSGVPSRFSGSGSGTDFTLTISSLQPEDFATYYCGQGVLWPATFGQGTKVEIKR

SEQ ID NO: 563 - protein, 108 aa, Artificial Sequence
  Description of Artificial Sequence: Synthetic polypeptide
DIQMTQSPSSLSASVGDRVTINCRASHFIGTLLSWYQHKPGKAPKLLITYGSLLQSGVPSRFSGSGSGTDFTLTISSLQPEDFATYYCGQGVLWPATFGQGTKVEIKR

SEQ ID NO: 564 - protein, 108 aa, Artificial Sequence
  Description of Artificial Sequence: Synthetic polypeptide
DIQLTQSPSSLSASVGDRVTITCRASHFIGTLLSWYQQKPGKATKLLITYGSLLQSGVPSRFSGSGSGTDFTLTISSLQPEDFATYYCGQGVLWPPTFGQGTKVEIKR

SEQ ID NO: 565 - protein, 108 aa, Artificial Sequence
  Description of Artificial Sequence: Synthetic polypeptide
DIQMTQSPSSLYASVGDRVTITCRVSHFIGTLLSWYQQKPGKAPKLLITYGSLLQSGVPSRFSGSGSGTDFTLSISSLQPEDFATYYCGQGVLWPPTFGQGTKVEIKQ

SEQ ID NO: 566 - protein, 108 aa, Artificial Sequence
  Description of Artificial Sequence: Synthetic polypeptide
DIQMTQSPSSLSASVGDRVTITCRASHFIGTLLSWYQQKPRKAPKLLITYGSLLQSGVPSRFSGSGSGTDFTLTISSLQPEDFATYYCGQGVLWPPTFGQGTKVEIKR

SEQ ID NO: 567 - protein, 108 aa, Artificial Sequence
  Description of Artificial Sequence: Synthetic polypeptide
DIQIIQSPSSLSASVGDRVTITCRASHFIGTLLSWYQQKPGKAPKLLITYGSLLQSGVPSRFSGSGSGTDFTLTISSLQPEDFATYYCGQGVLWPPTFGQGTKVEIKR

SEQ ID NO: 568 - protein, 108 aa, Artificial Sequence
  Description of Artificial Sequence: Synthetic polypeptide
DIQMTQSPSSLSASVGDRVTITCRASHFIGTLLSWYQLKPGKAPKLLITYGSLLQSGVPSRFSGSGSGTDFTLTISSLQPEDFATYYCGQGVLWPATFGQGTKVEIKR

SEQ ID NO: 569 - protein, 108 aa, Artificial Sequence
  Description of Artificial Sequence: Synthetic polypeptide
DIQMTQSPSSLSASVGDRVTITCRASHFIGTLLSWYQLKPGKAPKLLITYGSWLQSGVPSRFSGSGSGTDFTLTISSLQPEDFATYYCGQGVLWPATFGQGTKVENKR

SEQ ID NO: 570 - protein, 108 aa, Artificial Sequence
  Description of Artificial Sequence: Synthetic polypeptide
DIQMTQSPSSLSASVGDRVTITCRASHFIGTLLSWYQLKPGKAPKLLITYGSLLQRGVPSRFSGSGSGTDFTLTISSLQPEDFATYYCGQGVLWPATFGQGTKVEIKR

SEQ ID NO: 571 - protein, 108 aa, Artificial Sequence
  Description of Artificial Sequence: Synthetic polypeptide
DIQMTQAPSSLSASVGDRVTITCRASHFIGTLLSWYQLKPGKAPKLLITYGSLLQSGVPSRFSGSGSGTDFTLTISSLQPEDFATYYCGQGVLWPATFGQGTKVENKR

SEQ ID NO: 572 - protein, 108 aa, Artificial Sequence
  Description of Artificial Sequence: Synthetic polypeptide
DIQMTQSPSSLSASVGDRVTITCRASHFIGSLLSWYQQKPGKAPKLLITYGSLLQSGVPSRFSGSGSGTDFALTISSLQPEDFATYYCGQGVLWPATFGQGTKVEIKR

SEQ ID NO: 573 - protein, 108 aa, Artificial Sequence
  Description of Artificial Sequence: Synthetic polypeptide
DIQMTQSPSSLSASVGDRVTITCRASHFIGSLLSWYQVKPGKAPKLLITYGSLLQSGVPSRFSGSGSGTDFTLTISSLQPEDFATYYCGQGVLWPATFGQGTTVEIKR

SEQ ID NO: 574 - protein, 108 aa, Artificial Sequence
  Description of Artificial Sequence: Synthetic polypeptide
DILMTQSPSSLSASVGDRVTITCRASHFIGSLLSWYQQKPGKAPKLLITYGSLLQSGVPSRFSGSGSGTDFTLTISSLQPEDFATYYCGQGVLWPATFGQGTKVEIKR

SEQ ID NO: 575 - protein, 108 aa, Artificial Sequence
  Description of Artificial Sequence: Synthetic polypeptide
DIQMTQSPSSLSASVGDRVTITCRASHFIGTLVSWYQQKPGKAPKLLITYGSLLQSGVPSRFSGSGSGTDFTLTISSLQPEDFATYYCGQGVLWPATYGQGTKVEIKR

SEQ ID NO: 576 - protein, 108 aa, Artificial Sequence
  Description of Artificial Sequence: Synthetic polypeptide
DIQMTQSPSSLSASVGDRVTITCRASHFIGTLVSWYQQKPGKAPKLLITYGSLLQSGVPSRFSGSGSGTDFTLTISSLQPEDFATYYCGQGVLWPATFGQGTKVENKR

SEQ ID NO: 577 - protein, 108 aa, Artificial Sequence
  Description of Artificial Sequence: Synthetic polypeptide
DIKMTQSPSSLSASVGDRVTITCRASHFIGTLVSWYQQKPGKAPKLLITYGSMLQSGVPSRFSGSGSGTDFTLTISSLQPEDFATYYCGQGVLWPATFGQGTKVEIKR

SEQ ID NO: 578 - protein, 108 aa, Artificial Sequence
  Description of Artificial Sequence: Synthetic polypeptide
DIQMTQSPSSLSASVGDRVTITCQASHFIGTLVSWYQQKPGKAPKLLITYGSLLQSGVPSRFSGSGSGTDFTLTISSLQPEDFATYYCGQGVLWPATFGQGTKVEIKR

SEQ ID NO: 579 - protein, 108 aa, Artificial Sequence
  Description of Artificial Sequence: Synthetic polypeptide
DIQMTQSPSSLSASVGDRVTITCRASHFIGTLLSWYQQKPGKAPKLLITYGSWLQSGVPSRFSGSGSGTDFTLTISSLQPEDFATYYCGQGVLWPATFGQGTKVEIKR

SEQ ID NO: 580 - protein, 108 aa, Artificial Sequence
  Description of Artificial Sequence: Synthetic polypeptide
DIQMTQSPSSLSASVGDRVTITCRASHFIGTLLSWYQLKPGKAPKLLITYGSWLQSGVPSRFSGSGSGTDFTLTISSLQPEDFATYYCGQGVLWPATFGQGTKVEIKR

SEQ ID NO: 581 - protein, 108 aa, Artificial Sequence
  Description of Artificial Sequence: Synthetic polypeptide
DIQMTQSPSSLSASVGDRVTITCRASHFIGTLLSWYQQKPGKAPKLLITYGSLLQSGVPSRFSGSGFGTDFTLTISSLQPEDFATYYCGQEVLWPATFGQGTKVEIKR

SEQ ID NO: 582 - protein, 108 aa, Artificial Sequence
  Description of Artificial Sequence: Synthetic polypeptide
DIQMTQSPSSLSASVGDRVSITCRASHFIGTLLSWYQQKPGKAPKLLITYGSLLQSGVPSRFSGSGFGTDFTLTISSLQPEDLATYYCGQEVLWPATFGQGTKVEIKR

SEQ ID NO: 583 - protein, 108 aa, Artificial Sequence
  Description of Artificial Sequence: Synthetic polypeptide
DIQMTQSPSSLSASVGDRVTITCQASHFIGTLLSWYQQKPGKAPKLLITYGSLLQSGVPSRFSGSGFGTDFTLTISSLQPEDFATYYCGQEVLWPATFGQGTKVEIKR

SEQ ID NO: 584 - protein, 108 aa, Artificial Sequence
  Description of Artificial Sequence: Synthetic polypeptide
DIQMTQSPSSLSASVGDRVTITCRASHFIGTLLSWYQQKPGKAPKLLITYGSLLQSGVPSRFSGSGFGTEFTLTIGSLQPEDFATYYCGQGVLWPATFGQGTKVEIKR

SEQ ID NO: 585 - protein, 108 aa, Artificial Sequence; identical to SEQ ID NO: 556
  Description of Artificial Sequence: Synthetic polypeptide

SEQ ID NO: 586 - protein, 108 aa, Artificial Sequence
  Description of Artificial Sequence: Synthetic polypeptide
DIQMTQSPSSLSASVGDRVTITCRASHFIASLLSWYQVKPGKAPKLLITYGSLLQSGVPSRFSGSGSGTDFTLTISSLQPEDFATYYCGQGVLWPATFGQGTTVEIKR

SEQ ID NO: 587 - protein, 108 aa, Artificial Sequence
  Description of Artificial Sequence: Synthetic polypeptide
DIQMTQSPSSLSASVGDRVTITCRASHFIAQLLSWYQVKPGKAPKLLITYGSLLQSGVPSRFSGSGSGTDFTLTISSLQPEDFATYYCGQGVLWPATFGQGTTVEIKR

SEQ ID NO: 588 - protein, 108 aa, Artificial Sequence
  Description of Artificial Sequence: Synthetic polypeptide
DIQMTQSPSSLSASVGDRVTITCRASHFIAQLLSWYQVKPGKAPKLLITYGSLLQSGVPSRFSGSGSGTDFTLTISSLQPEDFATYYCGQGVLWPATFGQGTTVEIRR

SEQ ID NO: 589 - protein, 108 aa, Artificial Sequence
  Description of Artificial Sequence: Synthetic polypeptide
DIQMTQSPSSLSASVGDRVTITCRASHYIASLLSWYQVKPGKAPKLLITYGSLLQSGAPSRFSGSGSGTDFTLTISSLQPEDFATYYCGQGVLWPATFGQGTTVEIKR

SEQ ID NO: 590 - protein, 108 aa, Artificial Sequence
  Description of Artificial Sequence: Synthetic polypeptide
DIQMTQSPSSLSASVGDRVTITCRASHFIGSLLSWYQVKPGKAPKLLITWASYLQSGVPSRFSGSGSGTDFTLTISSLQPEDFATYYCGQGVLWPATFGQGTTVEIKR

SEQ ID NO: 591 - protein, 108 aa, Artificial Sequence
  Description of Artificial Sequence: Synthetic polypeptide
DIQMTQSPSSLSASVGDRVTITCRASHFIGSLLSWYQVKPGKAPKLLITWTSYLQSGVPSRFSGSGSGTDFTLTISSLQPEDFATYYCGQGVLWPATFGQGTTVEIKR

SEQ ID NO: 592 - protein, 108 aa, Artificial Sequence
  Description of Artificial Sequence: Synthetic polypeptide
DIQMTQSPSSLSASVGDRVTITCRASHFIGSLLSWYQVKPGKAPKLLITWSSYLQSGVPSRFSGSGSGTDFTLTISSLQPEDFATYYCGQGVLWPATFGQGTTVEIKR

SEQ ID NO: 593 - protein, 108 aa, Artificial Sequence
  Description of Artificial Sequence: Synthetic polypeptide
DIQMTQSPSSLSASVGDRVTITCRASHFIGSLLSWYQVKPGKAPKLLITWGSWLQSGVPSRFSGSGSGTDFTLTISSLQPEDFATYYCGQGVLWPATFGQGTTVEIKR

SEQ ID NO: 594 - protein, 108 aa, Artificial Sequence
  Description of Artificial Sequence: Synthetic polypeptide
DIQMTQSPSSLSASVGDRVTITCRASHFIGSLLSWYQVKPGKAPKLLITWASWLQSGVPSRFSGSGSGTDFTLTISSLQPEDFATYYCGQGVLWPATFGQGTTVEIKR

SEQ ID NO: 595 - protein, 108 aa, Artificial Sequence
  Description of Artificial Sequence: Synthetic polypeptide
DIQMTQSPSSLSASVGDRVTITCRASHFIGSLLSWYQVKPGKAPKLLITWSSWLQSGVPSRFSGSGSGTDFTLTISSLQPEDFATYYCGQGVLWPATFGQGTTVEIKR

SEQ ID NO: 596 - protein, 108 aa, Artificial Sequence
  Description of Artificial Sequence: Synthetic polypeptide
DIQMTQSPSSLSASVGDRVTITCRASHWIAQLLSWYQVKPGKAPKLLITYGSLLQSGVPSRFSGSGSGTDFTLTISSLQPEDFATYYCGQGVLWPATFGQGTTVEIKR

SEQ ID NO: 597 - protein, 108 aa, Artificial Sequence
  Description of Artificial Sequence: Synthetic polypeptide
DIQMTQSPSSLSASVGDRVTITCRASHFIGSLLRWYQVKPGKAPKLLITYGSLLQSGVPSRFSGSGSGTDFTLTISSLQPEDFATYYCGQGVLWPATFGQGTTVEIKR

SEQ ID NO: 598 - protein, 108 aa, Artificial Sequence
  Description of Artificial Sequence: Synthetic polypeptide
DIQMTQSPSSLSASVGDRVTITCRASHRIAQLLSWYQVKPGKAPKLLITYGSLLQSGVPSRFSGSGSGTDFTLTISSLQPEDFATYYCGQGVLWPATFGQGTTVEIKR

SEQ ID NO: 599 - protein, 108 aa, Artificial Sequence
  Description of Artificial Sequence: Synthetic polypeptide
DIQMTQSPSSLSASVGDRVTITCRASHYIASLLSWYQVKPGKAPKLLITYGSLLQSGVPSRFSGSGSGTDFTLTISSLQPEDFATYYCGQGVLWPATFGQGTTVEIKR

SEQ ID NO: 600 - protein, 108 aa, Artificial Sequence
  Description of Artificial Sequence: Synthetic polypeptide
DIQMTQSPSSLSASVGDRVTITCRASHFIGSLLSWYQVKPGKAPKLLIRFGSLLQSGVPSRFSGSGSGTDFTLTISSLQPEDFATYYCGQGVLWPATFGQGTTVEIKR

SEQ ID NO: 601 - protein, 108 aa, Artificial Sequence
  Description of Artificial Sequence: Synthetic polypeptide
DIQMTQSPSSLSASVGDRVTITCRASHFIGSLLSWYQVKPGKAPKLLITYKSYLQSGVPSRFSGSGSGTDFTLTISSLQPEDFATYYCGQGVLWPATFGQGTTVEIKR

SEQ ID NO: 602 - protein, 108 aa, Artificial Sequence
  Description of Artificial Sequence: Synthetic polypeptide
DIQMTQSPSSLSASVGDRVTITCRASHFIGSLLSWYQVKPGKAPKLLITWGSYLQSGVPSRFSGSGSGTDFTLTISSLQPEDFATYYCGQGVLWPATFGQGTTVEIKR

SEQ ID NO: 603 - protein, 108 aa, Artificial Sequence
  Description of Artificial Sequence: Synthetic polypeptide
DIQMTQSPSSLSASVGDRVTITCRASHFIWGPLSWYQVKPGKAPKLLITYGSLLQSGVPSRFSGSGSGTDFTLTISSLQPEDSATYYCGQGVLWPATFGQGTTVEIKR

SEQ ID NO: 604 - protein, 108 aa, Artificial Sequence
  Description of Artificial Sequence: Synthetic polypeptide
DIQMTQSPSSLSASVGDRVTITCRASHWIATLLSWYQVKPGKAPKLLITYGSLLQSGVPSRFSGSGSGTDFTLTISSLQPEDFATYYCGQGVLWPATFGQGTTVEIKR

SEQ ID NO: 605 - protein, 108 aa, Artificial Sequence
  Description of Artificial Sequence: Synthetic polypeptide
DIQMTQSPSSLSASVGDRVTITCRASHFIWGPLSWYQVKPGKAPKLLITYGSLLQSGVPSRFSGSGSGTDFTLTISSLQPEDFATYYCGQGVLWPATFGQGTTVEIKR

SEQ ID NO: 606 - protein, 108 aa, Artificial Sequence
  Description of Artificial Sequence: Synthetic polypeptide
DIQMTQSPSSLSASVGDRVTITCRASHFIGSLLNWYQVKPGKAPKLLITYGSLLQSGVPSRFSGSGSGTDFTLTISSLQPEDFATYYCGQGVLWPATFGQGTTVEIKR

SEQ ID NO: 607 - protein, 108 aa, Artificial Sequence
  Description of Artificial Sequence: Synthetic polypeptide
GIQMTQSPSSLSASVGDRVTITCRASHFIGSLLSWYQVKPGKAPKLLITYGSWLQSGVPSRFSGSGSGTDFTLTISSLQPEDFATYYCGQGVLWPATFGQGTTVEIKR

SEQ ID NO: 608 - DNA, 348 bp, Artificial Sequence
  Description of Artificial Sequence: Synthetic polynucleotide
gaggtgcagctgttggagtccgggggaggcttggtacagcctggggggtccctgcgtctctcctgtgcagcctccggattcacctttcgggattatgagatgtggtgggtccgccaggctccagggaagggtctagagcgggtctcagctattaatccgcagggtacgcgtacatactacgcagactccgtgaagggccggttcaccatctcccgcgacaattccaagaacacgctgtatctgcaaatgaacagcctgcgtgccgaggacaccgcggtatattactgtgcgaaacttccgttttactttcaggagtggggtcagggaaccctggtcaccgtctcgagc

SEQ ID NO: 609 - DNA, 348 bp, Artificial Sequence
  Description of Artificial Sequence: Synthetic polynucleotide
gaggtgcagctgttggagtctgggggaggcttggtacagcctggggggtccctgcgtctctcctgtgcagcctccggattcacctttcgggattatgagatgtggtgggtccgccaggctccagggaagggtctagagcgggtctcagctattaatccgcagggtacgcgtacatactacgcagactccgtgaagggccggttcaccatctcccgcgacaattccaagaacacgctgtatctgcaaatgaacagcctgcgtgccgaggacaccgcggtatattactgtgcgaaacttccgttttactttcacgagtggggtcagggaaccctggtcaccgtctcgagc

SEQ ID NO: 610 - DNA, 348 bp, Artificial Sequence
  Description of Artificial Sequence: Synthetic polynucleotide
gaggtgcagctgttggagtctgggggaggcttggtacagcctggggggtccctgcgtctctcctgtgcagcctccggattcacctttgagtggtatgagatgcagtgggtccgccaggctccagggaagggtctagagtgggtctcagcgatttctggtgatggttatcgtacatactacgcagactccgtgaaaggccggttcaccatctcccgcgacaattccaagaacacgctgtatctgcaaatgaacagcctgcgtgccgaggacaccgcggtatattactgtgcgaaagagcttgggtattttgactactggggtcagggaaccctggtcaccgtctcgagc

SEQ ID NO: 611 - DNA, 348 bp, Artificial Sequence
  Description of Artificial Sequence: Synthetic polynucleotide
gaggtgcagctgttggagtctgggggaggcttggtacagcctggggggtccctgcgtctctcctgtgcagcctccggattcacctttgaggaggaggagatgatttgggtccgccaggctccagggaagggtctagagtgggtctcagctattagtggtagtggtggtagcacatactacgcagactccgtgaagggccggttcaccatctcccgcgacaattccaagaacacgctgtatctgcaaatgaacagcctgcgtgccgaggataccgcggtatattactgtgcgaaagagccgtttcgttttgactactggggtcagggaaccctggtcaccgtctcgagc

SEQ ID NO: 612 - DNA, 348 bp, Artificial Sequence
  Description of Artificial Sequence: Synthetic polynucleotide
gaggtgcagctgttggagtctgggggaggcttggtacagcctggggggtccctgcgtctctcctgtgcagcctccggattcacctttactgagtatgagatgatttgggtccgccaggctccagggaagggtctggagtgggtctcatctatttcgggtaatggtgctaatacatactacgcagactccgtgaagggccggttcaccatctcccgcgacaattccaagaacacgctgtatctgcaaatgaacagcctgcgtgccgaggacaccgcggtatattactgtgcgaaagagccgcttaggtttgactactggggtcagggaaccctggtcaccgtctcgagc

SEQ ID NO: 613 - DNA, 369 bp, Artificial Sequence
  Description of Artificial Sequence: Synthetic polynucleotide
gaggtgcagctgttggagtctgggggaggcttggtacagcctggggggtccctgcgtctctcctgtacagcctccggattcacctttaatatgtatgagatgtcgtgggtccgccaggctccagggaagggtctagagtgggtctcaggtattagtaggcgtggttttactacatactacgcagactccgtgaagggccggttcaccatctcccgcgacaattccaagaacacgctgtatctgcaaatgaacagcctgcgtgccgaggataccgcggtatattactgtgcgaaagagccgattacgtatgctatgaggtatgcgcgttttgactactggggtcagggaaccctggtcaccgtctcgagc

SEQ ID NO: 614 - DNA, 348 bp, Artificial Sequence
  Description of Artificial Sequence: Synthetic polynucleotide
gaggtgcagctgttggagtctgggggaggcttggtacagcctggggggtccctgcgtctctcctgtgcagcctccggattcacctttcgggattatgagatgtggtgggtccgccaggctccagggaagggtctagagcgggtctcagctattaatccgcagggtacgcgtacatactacgcagactccgtgaagggccggttcaccatctcccgcgacaattccaagaacacgctgtatctgcaaatgaacagcctgcgtgccgaggataccgcggtatattactgtgcgaaacttccgtttatttttgactactggggtcagggaaccctggtcaccgtctcgagc

SEQ ID NO: 615 - DNA, 357 bp, Artificial Sequence
  Description of Artificial Sequence: Synthetic polynucleotide
gaggtgcagctgttggagtctgggggaggcttggtacagcctggggggtccctgcgtctctcctgtgcagcctccggattcaccttttcgacttatcatatgcagtgggtccgccaggctccagggaagggtctggagtgggtctcaatgattgatgcggatggtcttgggacatactacgcagactccgtgaagggccggttcaccatctcccgcgacaattccaagaacacgctgtatctgcaaatgaacagcctgcgtgccgaggacaccgcggtatattactgtgcgaaaccgggtccgcagtttggtcagtttgactactggggtcagggaaccctggtcaccgtctcgagc

SEQ ID NO: 616 - DNA, 363 bp, Artificial Sequence
  Description of Artificial Sequence: Synthetic polynucleotide
gaggtgcagctgttggagtctgggggaggcttggtacagcctggggggtccctgcgtctctcctgtgcagcttccggattcaccttttcggggtatgatatgcagtgggtccgccaggctccagggaagggtctagagtgggtctcaacgattagtgcgtcgggtgtttttacatactacgcagactccgtgaagggccggttcaccacctcccgcgacaattccaagaacacgctgtatctgcaaatgaacagcctgcgtgccgaggacaccgcggtatattactgtgcgaaatatcctaatcgttttgcgcttaataattttgactactggggtcagggaaccctggtcaccgtctcgagc

SEQ ID NO: 617 - DNA, 324 bp, Artificial Sequence
  Description of Artificial Sequence: Synthetic polynucleotide
gacatccagatgacccagtctccatcctccctgtctgcatctgtaggagaccgtgtcaccatcacttgccgggcaaatagttctattttgtgggcgttagcttggtaccagcagaaaccagggaaagcccctaagctcctgatcgagagttcttccggtttgcaaagtggggtcccatcacgtttcagtggcagtggatctgggacagatttcactctcaccatcagcagtctgcaacctgaagattttgctacgtactactgtgttcagaatgcgggttggcctggtacgttcggccaagggaccaaggtggaaatcaaacgg

SEQ ID NO: 618 - DNA, 324 bp, Artificial Sequence
  Description of Artificial Sequence: Synthetic polynucleotide
gacatccagatgacccagtctccatcctccctgtctgcatctgtaggagaccgtgtcaccatcacttgccgggcaagtcagacgattgagcgtcgtttaaattggtatcagcagaaaccagggaaagcccctaagctcctgatctatcttgcttcccgtttgcaaagtggggtcccatcacgtttcagtggcagtggatctgggacagatttcactctcaccatcagcagtctgcaacctgaagattttgctacgtactactgtcatcagtatgcgagtccacctttgacgttcggccaagggaccaaagtggaaatcaaacgg

SEQ ID NO: 619 - DNA, 348 bp, Artificial Sequence
  Description of Artificial Sequence: Synthetic polynucleotide
gaggtgcagctgttggagtctgggggaggcttggtacagcctggggggtccctgcgtctctcctgtgcagcctccggattcacctttgctgggtatgagatgtggtgggtccgccaggctccagggaagggtctagagcgggtctcagctattagtggtagtggtggtagcacatactacgcagactccgtgaagggccggttcaccatctcccgcgacgattccaagaacacgctgtatctgcaaatgaacagcctgcgtgccgaggataccgcggtatattactgtgcgaaagatccttatagttttgactactggggtcagggaaccctggtcaccgtctcgagc

SEQ ID NO: 620 - DNA, 360 bp, Artificial Sequence
  Description of Artificial Sequence: Synthetic polynucleotide
gaggtgcagctgttggagtctgggggaggcttggtacagcctggggggtccctgcgtctctcctgtgcagcctccggattcacctttccgactgctgagatggtgtgggtccgccaggctccagggaagggtctagagtgggtctcatctatttcggctagtggtggttctacatactacgcagactccgtgaagggccggttcaccatctcccgcgacaattccaagaacacgctgtatctgcaaatgaacagcctgcgtgccgaggacaccgcggtatattactgtgcgaaagagccggtgagttatgtggcgacgtttgactactggggtcagggaaccctggtcaccgtctcgagc

SEQ ID NO: 621 - DNA, 324 bp, Artificial Sequence
  Description of Artificial Sequence: Synthetic polynucleotide
gacatccagatgacccagtctccatcctccctgtctgcatctgtaggagaccgtgtcaccatcacttgccgggcaagtcattttattggtactctgttatcttggtaccagcagaaaccagggaaagcccctaagctcctgatcacttatggttccttgttgcaaagtggggtcccatcacgtttcagtggcagtggatctgggacagatttcactctcaccatcagcagtctgcaacctgaagattttgctacgtactactgtggtcagggggtgctgtggcctgcgacgttcggccaagggaccaaggtggaaatcaaacgg

SEQ ID NO: 622 - DNA, 357 bp, Artificial Sequence
  Description of Artificial Sequence: Synthetic polynucleotide
gaggtgcagctgttggagtctgggggaggcttggtacagcctggggggtccctgcgtctctcctgtgcagcctccggattcacctttccgaagaatgagatgacgtgggtccgccaggctccagggaagggtctagagtgggtctcagcgattgagtcggatggtcaggctacatactacgcagactccgtgaagggccggttcaccatctcccgcgacaattccaagaacacgctgtatctgcaaatgaacagcctgcgtgctgaggacaccgcggtatattactgtgcgaaaaatcggattcctgatcttgtgtttgactactggggtcagggaaccctggtcaccgtctcgagc

SEQ ID NO: 623 - DNA, 357 bp, Artificial Sequence
  Description of Artificial Sequence: Synthetic polynucleotide
gaggtgcagctgttggagtctgggggaggcttggtacagcctggggggtccctgcgtctctcctgtgcagcctccggattcacctttgatgctggggctatgacgtgggtccgccaggctccagggaagggtctagagtgggtctcatctattgataaggagggtctgtctacatactacgcagactccgtgaagggccggttcaccatctcccgcgacaattccaagaacacgctgtatctgcaaatgaacagcctgcgtgccgaggataccgcggtatattactgtgcgaaaggtaggattcctgggctggtttttgactactggggtcagggaaccctggtcaccgtctcgagc

SEQ ID NO: 624 - DNA, 357 bp, Artificial Sequence
  Description of Artificial Sequence: Synthetic polynucleotide
gaggtgcagctgttggagtctgggggaggcttggtacagcctggggggtccctgcgtctctcctgtgcagcctccggattcacctttggtgatgcggcgatgacttgggtccgccaggctccagggaagggtctagagtgggtctcagcgattcagcctatgggtgatggtacatactacgcagactccgtgaagggccggttcaccgtctcccgcgacaattccaagaacacgctgtatctgcaaatgaacagcctgcgtgccgaggacaccgcggtatattactgtgcgaaagggcgtattcctactcttcagtttgactactggggtcagggaaccctggtcaccgtctcgagc

SEQ ID NO: 625 - DNA, 357 bp, Artificial Sequence
  Description of Artificial Sequence: Synthetic polynucleotide
gaggtgcagctgttggagtctgggggaggcttggtacagcctggggggtccctgcgtctctcctgtgcagcctccggattcacctttgaggattcgcctatgacttgggtccgccaggctccagggaagggtctagagtgggtctcagctattacttcgaatggttatgagacatactacgcagactccgtgaagggccggttcaccatctcccgcgacaattccaagaacacgctgtatctgcaaatgaacagcctgcgtgccgaggacaccgcggtatattactgtgcgaaagggcgtattcctactcttcattttgactactggggtcagggaaccctggtcaccgtctcgagc

SEQ ID NO: 626 - DNA, 357 bp, Artificial Sequence
  Description of Artificial Sequence: Synthetic polynucleotide
gaggtgcagctgttggagtctgggggaggcttggtacagcctggggggtccctgcgtctctcctgtgcagcctccggattcacctttgatgagcatgatatgagttgggtccgccaggctccagggaagggtctagagtgggtctcacgtattggtccggatggttttcatacatactacgcagactccgtgaagggccggttcaccatctcccgcgacaattccaagaacacgctgtatctgcaaatgaacagcctgcgtgccgaggacaccgcggtatattactgtgcgaaagggcgtattcctactcttcattttgactactggggtcagggaaccctggtcaccgtctcgagc

SEQ ID NO: 627 - DNA, 357 bp, Artificial Sequence
  Description of Artificial Sequence: Synthetic polynucleotide
gaggtgcagctgttggagtctgggggaggcttggtacagcctggggggtccctgcgtctctcctgtgcagcctccggattcacctttggtgagtatcatatgtcttgggtccgccaggctccagggaagggtctagagtgggtctcaaggattactcctcttggtacgcttacatactacgcagactccgtgaagggccggttcaccatctcccgcgacaattccaagaacacgctgtatctgcaaatgaacagcctgcgtgccgaggacaccgcggtatattactgtgcgaaagggcgtattccttcgcttacgtttgactactggggtcagggaaccctggtcaccgtctcgagc

SEQ ID NO: 628 - DNA, 357 bp, Artificial Sequence
  Description of Artificial Sequence: Synthetic polynucleotide
gaggtgcagctgttggagtctgggggaggcttggtacagcctggggggtccctgcgtctctcctgtgcagcctccggattcacctttggtacgaatgcgatgagttgggtccgccaggctccagggaagggtctggagtgggtctcaaggatttcgccgggtggtgattatacatactacgcagactccgtgaagggccggttcaccatctcccgcgacaattccaagaacacgctgtatctgcaaatgaacagcctgcgtgccgaggataccgcggtgtattactgtgcgaaagggcgtgttccggatctgctttttgactactggggtcagggaaccctggtcaccgtctcgagc

SEQ ID NO: 629 - DNA, 357 bp, Artificial Sequence
  Description of Artificial Sequence: Synthetic polynucleotide
gaggtgcagctgttggagtctgggggaggcttggtacagcctggggggtccctgcgtctctcctgtgcagcctccggattcacctttccgtctgaggagatgtcttgggtccgccaggctccagggaagggtctagagtgggtctcaaggatttcggctgatggtgctaatacatactacgcagactccgtgaagggccggttcaccatctcccgcgacaattccaagaacacgctgtatctgcaaatgaacagcctgcgtgccgaggacgccgcggtatattactgtgcgaaagggcgtgttccggatctgctttttgactactggggtcagggaaccctggtcaccgtctcgagc

SEQ ID NO: 630 - DNA, 357 bp, Artificial Sequence
  Description of Artificial Sequence: Synthetic polynucleotide
gaggtgcagctgttggagtctgggggaggcttggtacagcctggggggtccctgcgtctctcctgtgcagcctccggattcacctttgctgaggatgatatgacttgggtccgccaggctccagggaagggtctagagtgggtctcacgtattgcggttgatggtgatcggacatactacgcagactccgtgaagggccggttcaccatctcccgcgacaattccaagaacacgctgtatctgcaaatgaacagcctgcgtgccgaggacaccgcggtatattactgtgcgaaaggtaaggttccgtctcttcattttgactactggggtcagggaaccctggtcaccgtctcgagc

SEQ ID NO: 631 - DNA, 357 bp, Artificial Sequence
  Description of Artificial Sequence: Synthetic polynucleotide
gaggtgcagctgttggagtctgggggaggcttggtacagcctgggggatccctgcgtctctcctgtgcagcctccggattcacctttaggacgatggatatgtcttgggtccgccaggctccagggaagggtctagagtgggtctcacgtattacgggtgatggtatgaatacatactacgcagactccgtgaagggccggttcaccatctcccgcgacaattccaagaacacgctgtatctgcaaatgaacagcctgcgtgccggggacaccgcggtatattactgtgcgaaaggggtgactccggatttgacttttgactactggggtcagggaaccctggtcaccgtctcgagc

SEQ ID NO: 632 - DNA, 357 bp, Artificial Sequence
  Description of Artificial Sequence: Synthetic polynucleotide
gaggtgcagctgttggagtctgggggaggcttggtacagcctggggggtccctgcgtctctcctgtgcagcctccggattcacctttgagcgtgatgatatgacgtgggtccgccaggctccagggaagggtctagagtgggtctcacgtattaatgctgggggtgtgcatacatactacgcagactccgtgaagggccggttcaccatctcccgcgacaattccaagaacacgctgtatctgcaaatgaacagcctgcgtgccgaggataccgcggtatattactgtgcgaaaggggtgactccggatttgacttttgactactggggtcagggaaccctggtcaccgtctcgagc

SEQ ID NO: 633 - DNA, 357 bp, Artificial Sequence
  Description of Artificial Sequence: Synthetic polynucleotide
gaggtgcagctgttggagtctgggggaggcttggtacagcctggggggtccctgcgtctctcctgtgcagcctccggattcacctttgatgatgattctatgacgtgggtccgccaggctccagggaagggtctagagtgggtctcacggatttcgagtgatggtgcgagtacatactacgcagactccgtgaagggccggttcaccatctcccgcgacaattccaagaacacgctgtatctgcaaatgaacagcctgcgtgccgaggacaccgcggtatattactgtgcgaaaggggtgactccggatttgacttttgactactggggtcagggaaccctggtcaccgtctcgagc

SEQ ID NO: 634 - DNA, 357 bp, Artificial Sequence
  Description of Artificial Sequence: Synthetic polynucleotide
gaggtgcagctgttggagtctgggggaggcttggtacagcctggggggtccctgcgtctctcctgtgcagcctccggattcacctttactgaggaggatatgacgtgggtccgccaggctccagggaagggtctagagtgggtctcacgtattgatagtgttggtgaggggacatactacgcagactccgtgaagggccggttcaccatctcccgcgacaattccaagaacacgctgtatctgcaaatgaacagcctgcgtgccgaggacaccgcggtatattactgtgcgaaaggggtgactccggatttgacttttgactactggggtcagggaaccctggtcaccgtctcgagc

SEQ ID NO: 635 - DNA, 357 bp, Artificial Sequence
  Description of Artificial Sequence: Synthetic polynucleotide
gaggtgcagctgttggagtctgggggaggcttggtacagcctggggggtccctgcgtctctcctgtgcagcctccggattcaccttttctgattcggcgatgagttgggtccgccaggctccagggaagggtctagagtgggtctcacggattgataatcctggtcagcatacatactacgcagactccgtgaagggccggttcaccatctcccgcgacaattccaagaacacgctgtatctgcaaatgaacagcctgcgtgccgaggataccgcggtatattactgtgcgaaaggtactgttcctacgctggagtttgactactggggtcagggaaccctggtcaccgtctcgagc

SEQ ID NO: 636 - DNA, 357 bp, Artificial Sequence
  Description of Artificial Sequence: Synthetic polynucleotide
gaggtgcagctgttggagtctgggggaggcttggtacagcctggggggtccctgcgtctctcctgtgcagcctccggattcacctttgggcagcatagtatgacttgggtccgccaggctccagggaagggtctagagtgggtctcacgtattgatggtgggggttataatacatactacgcagactccgtgaagggccggttcaccatctcccgcgacaattccaagaacacgctgtatctgcaaatgaacagcctgcgtgccgaggacaccgcggtatattactgtgcgaaaggggaggttcctcgtcttcattttgactactggggtcagggaaccctggtcaccgtctcgagc

SEQ ID NO: 637 - DNA, 357 bp, Artificial Sequence
  Description of Artificial Sequence: Synthetic polynucleotide
gaggtgcagctgttggagtctgggggaggcttggtacagcctggggggtccctgcgtctctcctgtgcagcctccggattcacctttggtcaggagcctatgacttgggtccgccaggctccagggaagggtctagagtgggtctcacggattgcgtataatggtggtgatacatactacgcagactccgtgaagggccggttcaccatctcccgcgacaattccaagaacacgctgtatctgcaaatgaacagcctgcgtgccgaggacaccgcggtatattactgtgcgaaagggattactcctaatttgacttttgactactggggtcagggaaccctggtcaccgtctcgagc

SEQ ID NO: 638 - DNA, 357 bp, Artificial Sequence
  Description of Artificial Sequence: Synthetic polynucleotide
gaggtgcagctgttggagtctgggggaggcttggtacagcctggggggtccctgcgtctctcctgtgcagcctccggattcacctttgagaattatccgatgtcttgggtccgccaggctccagggaagggtctagagtgggtctcacgtattaatgctacgggttctattacatactacgcagactccgtgaagggccggttcaccatctcccgcgacaattccaagaacacgctgtatctgcaaatgaacagcctgcgtgccgaggacaccgcggtatattactgtgcgaaaggggttattcctcatttgatgtttgactactggggtcagggaaccctggtcaccgtctcgagc

SEQ ID NO: 639 - DNA, 357 bp, Artificial Sequence
  Description of Artificial Sequence: Synthetic polynucleotide
gaggtgcagctgttggagtctgggggaggcttggtacagcctggggggtccctgcgtctctcctgtgcagcctccggattcacctttcgtgattatgatatgagttgggtccgccaggctccagggaagggtctagagtgggtctcacgtattactggtactggtaatagtacatactacgcagactccgtgaagggccggttcaccatctcccgcgacaattccaagaacacgctgtatctgcaaatgaacagcctgcgtgccgaggacaccgcggtatattactgtgcgcaaggggtggtgccgtatcttgcttttgactactggggtcagggaaccctggtcaccgtctcgagc

SEQ ID NO: 640 - DNA, 357 bp, Artificial Sequence
  Description of Artificial Sequence: Synthetic polynucleotide
gaggtgcagctgttggagtctgggggaggcttggtacagcctggggggtccctgcgtctctcctgtgcagcctccggattcacctttgaggctgatgcgatgacgtgggtccgccaggctccagggaagggtctagagtgggtctcaaggattaatgtggatggtgatcggacatactacgcagactccgtgaagggccggttcaccatctcccgcgacaattccaagaacacgctgtatctgcaaatgaacagcctgcgtgccgaggacaccgcggtatattactgtgcgaaaggtactgttcctacgctggagtttgactactggggtcagggaaccctggtcaccgtctcgagc

SEQ ID NO: 641 - DNA, 357 bp, Artificial Sequence
  Description of Artificial Sequence: Synthetic polynucleotide
gaggtgcagctgttggagtctgggggaggcttggtacagcctggggggtccctgcgtctctcctgtgcagcctccggattcacctttgatcgggcggatatgacgtgggtccgccaggctccagggaagggtctagagtgggtctcaaggatttcgggggagggtaagtgtacatactacgcagactccgtgaagggccggttcaccatctcccgcgacaattccaagaacacgctgtatctgcaaatgaacagcctgcgtgccgaggacaccgcggtatattactgtgcgaaagggatggttcctaatttggtttttgactactggggtcagggaaccctggtcaccgtctcgagc

SEQ ID NO: 642 - DNA, 357 bp, Artificial Sequence
  Description of Artificial Sequence: Synthetic polynucleotide
gaggtgcagctgttggagtctgggggaggcttggtacagcctggggggtccctgcgtctctcctgtgcagcctccggattcacctttcattgggagccgatgtcttgggtccgccaggctccggggaagggtctagagtgggtctcacgtattaattcttctggttgggatacatactacgcagactccgtgaagggccggttcaccatctcccgcgacaattccaagaacacgctgtatctgcaaatgaacagcctgcgtgccgaggacaccgcggtatattactgtgcgaaagggatggttcctaatttggtttttgactactggggtcagggaaccctggtcaccgtctcgagc

SEQ ID NO: 643 - DNA, 357 bp, Artificial Sequence
  Description of Artificial Sequence: Synthetic polynucleotide
gaggtgcagctgttggagtctgggggaggcttggtacagcctggggggtccctgcgtctctcctgtgcagcctccggattcacctttgctgatgagccgatgacttgggtccgccaggctccagggaagggtctagagtgggtctcacgtattcctcctgagggtgctccgacatactacgcagactccgtgaagggccggttcaccatctcccgcgacaattccaagaacacgctgtatctgcaaatgaacagcctgcgtgccgaggacaccgcggtatattactgtgcgaaagggattactcctaatttgacttttgactactggggtcagggaaccctggtcaccgtctcgagc

SEQ ID NO: 644 - DNA, 357 bp, Artificial Sequence
  Description of Artificial Sequence: Synthetic polynucleotide
gaggtgcagctgttggagtctgggggaggcttggtacagcctggggggtccctgcgtctctcctgtgcagcctccggattcacctttcataatcatgatatgtcttgggtccgccaggctccagggaagggtctagagtgggtctcacgtattagtcggggtggtcttcagacatactacgcagactccgtgaagggccggttcaccatctcccgcgacaattccaagaacacgctgtatctgcaaatgaacagcctgcgtgccgaggacaccgcggtatattactgtgcgaaagggattgtgccggatctgcattttgactactggggtcagggaaccctggtcaccgtctcgagc

SEQ ID NO: 645 - DNA, 357 bp, Artificial Sequence
  Description of Artificial Sequence: Synthetic polynucleotide
gaggtgcagctgttggagtctgggggaggcttggtacagcctggggggtccctgcgtctctcctgtgcagcctccggattcacctttaatgagtatcctatgtcgtgggtccgccaggctccagggaagggtctagagtgggtctcacgtattaatggggatggtgctaatacatactacgcagactccgtgaagggccggttcaccatctcccgcgacaattccaagaacacgctgtatctgcaaatgaacagcctgcgtgccgaggacaccgcggtatattactgtgcgaaagggattattccggctatgcagtttgactactggggtcagggaaccctggtcaccgtctcgagc

SEQ ID NO: 646 - DNA, 357 bp, Artificial Sequence
  Description of Artificial Sequence: Synthetic polynucleotide
gaggtgcagctgttggagtctgggggaggcttggtacagcctggggggtccctgcgtctctcctgtgcagcctccggattcacctttggggatgtgcctatgtcgtgggtccgccaggctccagggaagggtctagagtgggtctcaaggattgatccttatggttctaatacatactacgcagactccgtgaagggccggttcaccatctcccgcgacaattccaagaacacgctgtatctgcaaatgaacagcctgcgtgccgaggacaccgcggtatattactgtgcgaaaggtattatgcctagtcttacttttgactactggggtcagggaaccctggtcaccgtctcgagc

SEQ ID NO: 647 - DNA, 357 bp, Artificial Sequence
  Description of Artificial Sequence: Synthetic polynucleotide
gaggtgcagctgttggagtctgggggaggcttggtacagcctggggggtccctgcgtctctcctgtgcagcctccggattcacctttgcggattatgatatgtcttgggtccgccaggctccagggaagggtctagagtgggtctcacgtatttcggcgcttggtgctactacatactacgcagactccgtgaagggccggttcaccatctcccgcgacaattccaagaacacgctgtatctgcaaatgaacagcctgcgtgccgaggacaccgcggtatattactgtgcgaaaggtcagcttccggcgttggagtttgactactggggtcagggaaccctggtcaccgtctcgagc

SEQ ID NO: 648 - DNA, 357 bp, Artificial Sequence
  Description of Artificial Sequence: Synthetic polynucleotide
gaggtgcagctgttggagtctgggggaggcttggtacagcctggggggtccctgcgtctctcctgtgcagcctccggattcacctttaagcgttattatatgacttgggtccgccaggctccagggaaggatctagagtgggtctcaggtattgttccttctggtaataggacatactacgcagactccgtgaagggccggttcaccatctcccgcgacaattccaagaacacgctgtatctgcaaatgaacagcctgcgtgccgaggacaccgcggtatattactgtgcgaaaggtaggattccggatctgcattttgactactggggtcagggaaccctggtcaccgtctcgagc

SEQ ID NO: 649 - DNA, 366 bp, Artificial Sequence
  Description of Artificial Sequence: Synthetic polynucleotide
gaggtgcagctgttggagtctgggggaggcttggtacagcctggggggtccctgcgtctctcctgtgcagcctccggattcacctttgctgattatgatatgacttgggtccgccaggctccagggaagggtctagagtgggtctcaaggatttctccgacgggtgggcagacatactacgcagactccgtgaagggccggttcaccatctcccgcgacaattccaagaacacgctgtatctgcaaatgaacagcctgcgtgccgaggacaccgcggtatattactgtgcgaaaggtgttattccgtatttgtctttttctccgtttgactactggggtcagggaaccctggtcaccgtctcgagc

SEQ ID NO: 650 - DNA, 366 bp, Artificial Sequence
  Description of Artificial Sequence: Synthetic polynucleotide
gaggtgcagctgttggagtctgggggaggcttggtacagcctggggggtccctgcgtctctcctgtgcagcctccggattcaccttttctaagtattggatgggttgggcccgccaggctccagggaagggtctagagtgggtctcatcgattgattcgcatggtgctggtacatactacgcagactccgtgaagggccggttcaccatctcccgcgacaattccaagaacacgctgtatctgcaaatgaacagcctgcgtgtcgaggacaccgcggtatattactgtgcgaaaggtgctcctaagtttatgactacgtatacgtttgactactggggtcagggaaccctggtcaccgtctcgagc

SEQ ID NO: 651 - DNA, 351 bp, Artificial Sequence
  Description of Artificial Sequence: Synthetic polynucleotide
gaggtgcagctgttggagtctgggggaggcttggtacagcctggggggtccctgcgtctctcctgtgcagcctccggattcacctttttgtcttatccgatgcattgggtccgccaggctccagggaagggtctagagtgggtctcatcgattgattcgaggggttcggttacatactacgcagactccgtgaagggccggttcaccatctcccgcgacaattccaagaacacgctgtatctgcaaatgaacagcctgcgtgccgaggacaccgcggtatattactgtgcgaaaggtcatagttggacgtttgactactggggtcagggaaccctggtcaccgtctcgagc

SEQ ID NO: 652 - DNA, 357 bp, Artificial Sequence
  Description of Artificial Sequence: Synthetic polynucleotide
gaggtgcagctgttggagtctgggggaggcttggtacagcctggggggtccctgcgtctctcctgtgcagcctccggattcacctttgcgaatagtaatatgacttgggtccgccaggctccagggaagggtctagagtgggtctcacgtattaatccggatggtgggtctacatactacgcagactccgtgaagggccggttcaccatctcccgcgacaattccaagaacacgctgtatctgcaaatgaacagcctgcgtgccgaggacaccgcggtatattactgtgcggaagggcgtattcctactcttcattttgactactggggtcagggaaccctggtcaccgtctcgagc

SEQ ID NO: 653 - DNA, 357 bp, Artificial Sequence
  Description of Artificial Sequence: Synthetic polynucleotide
gaggtgcagctgttggagtctgggggaggcttggtacagcctggggggtccctgcgtctctcctgtgcagcctccggattcacctttgggccgaggaggatgggttgggtccgccaggctccagggaagggtctagagtgggtctcatcgattgatgatattggtcgtaggacatactacgcagactccgtgaagggccggttcaccatctcccgcgacaattccaagaacacgctgtatctgcaaatgaacagcctgcgtgccgaggacaccgcggtatattactgtgcggaaggggcgcagggtgtgttgttgtttgactactggggtcagggaaccctggtcaccgtctcgagc

SEQ ID NO: 654 - DNA, 351 bp, Artificial Sequence
  Description of Artificial Sequence: Synthetic polynucleotide
gaggtgcagctgttggagtctgggggaggcttggtacagcctggggggtccctgcgtctctcctgtgcagcctccggattcacctttgaggattataggatggtttgggtccgccaggctccagggaagggtctagagtgggtctcatcgatttctacttctggtgagctgacatactacgcagactccgtgaagggccggttcaccatctcccgcgacaattccaagaacacgctgtatctgcaaatgaacagcctgcgtgccgaggacaccgcggtatattactgtgcggaaacggcgggtcagttttttgactactggggtcagggaaccctggtcaccgtctcgagc

SEQ ID NO: 655 - DNA, 348 bp, Artificial Sequence
  Description of Artificial Sequence: Synthetic polynucleotide
gaggtgcagctgttggagtctgggggaggcttggtacagcctggggggtccctgcgtctctcctgtgcagcctccggattcacctttccggagtatgagatggtttgggtccgccaggctccagggaagggtctggagtgggtctcagcgatttcgcgtgagggtcgggctacatactacgcagactccgtgaagggccggttcaccatctcccgcgacaattccaagaacacgctgtatctgcaaatgaacaacctgcgtgccgaggataccgcggtatattactgtgcgaaagagcctgttcgttttgactactggggtcagggaaccctggtcaccgtctcgagc

SEQ ID NO: 656 - DNA, 348 bp, Artificial Sequence
  Description of Artificial Sequence: Synthetic polynucleotide
gaggtgcagctgttggagtctgggggaggcttggtacagcctggggggtccctgcgtctctcctgtgcagcctccggattcaccttttcgacttatgagatgctttgggtccgccaggctccagggaagggtctagagtgggtctcatctatttcttcttctggtaattatacatactacgcagactccgtgaagggccggttcaccatctcccgcgacaattccaagaacacgctgtatctgcaaatgaacagcctgcgtgccgaggacaccgcggtatattactgtgcgaaagagccgctgatgtttgactactggggtcagggaaccctggtcaccgtctcgagc

SEQ ID NO: 657 - DNA, 348 bp, Artificial Sequence
  Description of Artificial Sequence: Synthetic polynucleotide
gaggtgcagctgttggagtctgggggaggcttggtacagcctggggggtccctgcgtctctcctgtgcagcctccggattcacctttgatactgaggagatgagttgggtccgccaggctccagggaagggtctagagtgggtctcagcgattagtcctaatggtgcttttacattctacgcagactccgtgaagggccggttcaccatctcccgcgacaattccaagaacacgctgtatctgcaaatgaacagcctgcgtgccgaggacaccgcggtatattactgtgcgaaagagcctattctgtttgactactggggtcagggaaccctggtcaccgtctcgagc

SEQ ID NO: 658 - DNA, 351 bp, Artificial Sequence
  Description of Artificial Sequence: Synthetic polynucleotide
gaggtgcagctgttggagtctgggggaggcttggtacagcctggggggtccctgcgtctctcctgtgcagcctccggattcacctttggtcattatgatatggtttgggtccgccaggctccagggaggggtctagagtgggtctcaactattaatggtgctggtctgaatacatactacgcagactccgtgaagggccggttcaccatctcccgcgacaattccaagaacacgctgtatctgcaaatgaacagcctgcgtgccgaggacaccgcggtatattactgtgcgcaaagtgctagtcgtatttttgactactggggtcagggaaccctggtcaccgtctcgagc

SEQ ID NO: 659 - DNA, 351 bp, Artificial Sequence
  Description of Artificial Sequence: Synthetic polynucleotide
gaggtgcagctgttggagtctgggggaggcttggtacagcctggggggtccctgcgtctctcctgtgcagcctccggattcacctttaggagttatgagatggcgtgggtccgccaggctccagggaagggtctagagtgggtctcatctattagtactctgggtacgaagacatactacgcagactccgtgaagggccggttcaccatctcccgcgacaattccaagaacacgctgtatctgcaaatgaacagcctgcgtgccgaggacaccgcggtatattactgtgcgcaatcttctactcatatttttgactactggggtcagggaaccctggtcaccgtctcgagc

SEQ ID NO: 660 - DNA, 351 bp, Artificial Sequence
  Description of Artificial Sequence: Synthetic polynucleotide
gaggtgcagctgttggagtctgggggaggcttggtacagcctggggggtccctgcgtctctcctgtgcagcctccggattcacctttattaggtatgagatggcttgggtccgccaggctccagggaagggtctagagtgggtctcaagtatttcgtcgtctggttggacgacatactacgcagactccgtgaagggccggttcaccatctcccgcgacaattccaagaacacgctgtatctgcaaatgaacagcctgcgtgccgaggataccgcggtatattactgtgcgaaaagtgatgctcatatttttgactactggggtcagggaaccctggtcaccgtctcgagc

SEQ ID NO: 661 - DNA, 351 bp, Artificial Sequence
  Description of Artificial Sequence: Synthetic polynucleotide
gaggtgcagctgttggagtctgggggaggcttggtacagcctggggggtccctgcgtctctcctgtgcagcctccggattcaccttttatgcttatgagatggcttgggtccgccaggctccagggaagggtctagagtgggtctcatctatttcggatgatggtacgcggacatactacgcagactccgtgaagggccggttcaccatctcccgcgacaattccaagaacacgctgtatctgcaaatgaacagcctgcgtgccgaggacaccgcggtatattactgtgcgaaagatctggggcaggggtttgactactggggtcagggaaccctggtcaccgtctcgagc

SEQ ID NO: 662 - DNA, 357 bp, Artificial Sequence
  Description of Artificial Sequence: Synthetic polynucleotide
gaggtgcagctgttggagtctgggggaggcttggtacagcctggggggtccctgcgtctctcctgtgcagcctccggattcacctttgctgatcatgggatgacgtgggtccgccaggctccagggaagggtctagagtgggtctcagggattggtccgtctggtgaggcgacatactacgcagactccgtgaagggccggttcaccatctcccgcgacaattccaagaacacgctgtatctgcaaatgaacagcctgcgtgccgaggacaccgcggtatattactgtgcgaaagatcgtattcctaatcttgtgtttgactactggggtcagggaaccctggtcaccgtctcgagc

SEQ ID NO: 663 - DNA, 348 bp, Artificial Sequence
  Description of Artificial Sequence: Synthetic polynucleotide
gaggtgcagctgttggagtctgggggaggcttggtacagcctggggggtccctgcgtctctcctgtgcagcctccggattcacctttgagtctcaggatatgtcttgggtccgccaggctccagggaagggtctagagtgggtctcaggtattagtccgaatggttgggatacatactacgcagactccgtgaagggccggttcaccatctcccgcgacaattccaagaacacgctgtatctgcaaatgaacagcctgcgtgccgaggataccgcggtatattactgtgcgaaagataggtctgattttgactactggggtcagggaaccctggtcaccgtctcgagc

SEQ ID NO: 664 - DNA, 351 bp, Artificial Sequence
  Description of Artificial Sequence: Synthetic polynucleotide
gaggtgcagctgttggagtctgggggaggcttggtacagcctggggggtccctgcgtctctcctgtgcagcctccggattcacctttggggattatgatatgtggtgggtccgccaggctccagggaagggtctagagtgggtctcaaggattcgtcatccgggtggtgttacatactacgcagactccgtgaagggccggttcaccatctcccgcgacaattccaagaacacgctgtatctgcaaatgaacagcctgcgtgccgaggacaccgcggtatattactgtgcgaaagctgttcctaagggttttgactactggggtcagggaaccctggtcaccgtctcgagc

SEQ ID NO: 665 - DNA, 357 bp, Artificial Sequence
  Description of Artificial Sequence: Synthetic polynucleotide
gaggtgcagctgttggagtctgggggaggcttggtacagcctggggggtccctgcgtctctcctgtgcagcctccggattcacctttcgggtttattggatgacttgggtccgccaggctccagggaagggtctagagtgggtctcatctattgatccgcagggtgggatgacatactacgcagactccgtgaagggccggttcaccatctctcgcgacaattccaagaacacgctgtatctgcaaatgaacagcctgcgtgccgaggataccgcggtatattactgtgcgaaagcgcgtattcctaatttggagtttgactactggggtcagggaaccctggtcaccgtctcgagc

SEQ ID NO: 666 - DNA, 357 bp, Artificial Sequence
  Description of Artificial Sequence: Synthetic polynucleotide
gaggtgcagctgttggagtctgggggaggcttggtacagcctggggagtccctgcgtctctcctgtgcagcctccggattcacctttagtgcttatgatatgacgtgggtccgccaggctccagggaagggtcttgagtgggtctcacgtattaatccgacgggttcttatacatactacgcagactccgtgaagggccggttcaccatctcccgcgacaattccaagaacacgctgtatctgcaaatgaacagcctgcgtgccgaggataccgcggtatattactgtgcgaaagctaagattccgaatttggtttttgactactggggtcagggaaccctggtcaccgtctcgagc

SEQ ID NO: 667 - DNA, 363 bp, Artificial Sequence
  Description of Artificial Sequence: Synthetic polynucleotide
gaggtgcagctgttggagtctgggggaggcttggtacagcctggggggtccctgcgtctctcctgtgcagcctccggattcacctttgcggatagtgagatgatgtgggtccgccaggctccagggaagggtctagagtgggtctcaggtattgcgcataatggtgggcatacatactacgcagactccgtgaagggccggttcaccatctcccgcgacaattccaagaacacgctgtatctgcaaatgaacagcctgcgtgccgaggacaccgcggtatattactgtgcgaaagctggtcatcctcagcagactgaggcttttgactactggggtcagggaaccctggtcaccgtctcgagc

SEQ ID NO: 668 - DNA, 348 bp, Artificial Sequence
  Description of Artificial Sequence: Synthetic polynucleotide
gagatgcagctgttggagtctgggggaggcttggtacagcctggggggtccctgcgtctctcctgtgcagcctccggattcacctttgctacttatgatatgtattgggtccgccaggctccagggaagggtctagagtgggtctcaaagatttctccgaatggttggagtacatactacgcagactccgtgaagggccggttcaccatctcccgcgacaattccaagaacacgctgtatctgcaaatgaacagcctgcgtgccgaggacaccgcggtatattactgtgcgaaatatcagacgcattttgactactggggtcagggaaccctggtcaccgtctcgagc

SEQ ID NO: 669 - DNA, 348 bp, Artificial Sequence
  Description of Artificial Sequence: Synthetic polynucleotide
gaggtgcagctgttggagtctgggggaggcttggtacagcctggggggtccctgcgtctctcctgtgcagcctccggattcacctttagtgtttatgatatgaggtgggtccgccaggctccagggaagggtctagagtgggtctcaacgatttcttcttcgggtacgtatacatactacgcagactccgtgaagggccggttcaccatctcccgcgacaattccaagaacacgctgtatctgcaaatgaacagcctgcgtgccgaggacaccgcggtatattactgtgcgaaatatcctaagaattttgactactggggtcagggaaccctggtcaccgtctcgagc

SEQ ID NO: 670 - DNA, 351 bp, Artificial Sequence
  Description of Artificial Sequence: Synthetic polynucleotide
gaggtgcagctgttggagtctgggggaggcttggtacagcctggggggtccctgcgtctctcctgtgcagcctccggattcaccttttctcatgaggatatgacttgggtccgccaggctccagggaagggtctagagtgggtctcaagtattagtccgaatggttgggatacatactacgcagactccgtgaagggccggttcaccatctcccgcgacaattccaagaacacgctgtatctgcaaatgaacagcctgcgtgccgaggacaccgcggtatattactgtgcgaaacgtactaggagtaagtttgactactggggtcagggaaccctggtcaccgtctcgagc

SEQ ID NO: 671 - DNA, 360 bp, Artificial Sequence
  Description of Artificial Sequence: Synthetic polynucleotide
gaggtgcagctgttggagtctgggggaggcttggtacagcctggggggtccctgcgtctctcctgtgcagcctccggattcacctttgagaagtatattatgggttgggcccgccaggctccagggaagggtctagagtgggtctcaacgattgattattggggtcagcatacatactacgcagactccgtgaagggccggttcactatctcccgcgacaattccaagaacacgctgtatctgcaaatgaacagcctgcgtgccgaggacaccgcggtatattactgtgcgaaacgtagtcatcttattcctctgcagtttgactactggggtcagggaaccctggtcaccgtctcgagc

SEQ ID NO: 672 - DNA, 369 bp, Artificial Sequence
  Description of Artificial Sequence: Synthetic polynucleotide
gaggtgcagctgttggagtctgggggaggcttggtacagcctggggggtccctgcgtctctcctgtgcagcctccggattcaccttttctgattatgcgatggggtgggtccgccaggctccagggaagggtctggagtgggtctcaacgatttcgtatgtgggttattatacatactacgcagactccgtgaagggccggttcaccatctcccgcgacaattccaagaacacgctgtatctgcaaatgaacagcctgcgtgccgaggacaccgcggtatattactgtgcgaaaaaggctctgcggggggaggcgtttacggagcgttttgactactggggtcagggaaccctggtcaccgtctcgagc

SEQ ID NO: 673 - DNA, 369 bp, Artificial Sequence
  Description of Artificial Sequence: Synthetic polynucleotide
gaggtgcagctgttggagtctgggggaggcttggtacagcctggggggtccctgcgtctctcctgtgcagcctccggattcacctttggtccgtatatgatgcattgggtccgccaggctccagggaagggtctagagtgggtctcaacgattgaggttaatggtaataggacatactacgcagactccgtgaagggccggttcaccatctcccgcgacaattccaagaacacgctgtatctgcaaatgaacagcctgcgtgccgaggacaccgcggtatattactgtgcgaaatgggttggttcgaagacgtcgtcggataagagttttgactactggggtcagggaaccctggtcaccgtctcgagc

SEQ ID NO: 674 - DNA, 360 bp, Artificial Sequence
  Description of Artificial Sequence: Synthetic polynucleotide
gaggtgcagctgttggagtctgggggaggcttggtacagcctggggggtccctgcgtctctcctgtgcagcctccggattcacctttggtacgacggagatggcttgggtccgccaggctccagggaagggtctagagtgggtctcaagtattggtagtgctggtgcttggacatactacgcagactccgtgaagggccggttcaccatctcccgcgacaattccaagaacacgctgtatctgcaaatgaacagcctgcgtgccgaggataccgcggtatattactgtgcgaaaattggtgggcatcctcagggtcagtttgactactggggtcagggaaccctggtcaccgtctcgagc

SEQ ID NO: 675 - DNA, 357 bp, Artificial Sequence
  Description of Artificial Sequence: Synthetic polynucleotide
gaggtgcagctgttggagtctgggggaggcttggtacagcctggggggtccctgcgcctctcctgtgcagcctccggattcacctttcctagggagtggatggcttgggtccgccaggctccagggaagggtctagagtgggtctcaagtattcagcctatgggtcagactacatactacgcagactccgtgaagggccggttcaccatctcccgcgacaattccaagaacacgctgtatctgcaaatgaacagcctgcgtgccgaggataccgcggtatattactgtgcgaaatattctcggaataaggggttttttgactactggggtcagggaaccctggtcaccgtctcgagc

SEQ ID NO: 676 - DNA, 357 bp, Artificial Sequence
  Description of Artificial Sequence: Synthetic polynucleotide
gaggtgcagctgttggagtctgggggaggcttggtacagcctggggggtccctgcgtctctcctgtgcagcctccggattcacctttacgagtgagtatatggggtgggtccgccaggctccagggaagggtctagagtgggtctcatctattcagaggtatggtagtacgacatactacgcagactccgtgaagggccggttcaccatctcccgcgacaattccaagaacacgctgtatctgcaaatgaacagcctgcgtgccgaggataccgcggtatattactgtgcgaaacatgagtctaattgggagacttttgactactggggtcagggaaccctggtcaccgtctcgagc

SEQ ID NO: 677 - DNA, 369 bp, Artificial Sequence
  Description of Artificial Sequence: Synthetic polynucleotide
gaggtgcagctgttggagtctgggggaggcttggtacagcctggggggtccctgcgtctctcctgtgcagcctccggattcaccttttcggtgtatagtatgcagtgggtccgccaggctccagggaagggtctagagtgggtctcagcgattactcctaatggtactcggacatactacgcagactccgtgaagggccggttcaccatctcccgcgacaattccaagaacacgctgtatctgcaaatgaacagcctgcgtgccgaggacaccgcggtatattactgtgcgaaaactcttggtcggggttcttatcctggtgttgattttgactactggggtcagggaaccctggtcaccgtctcgagc

SEQ ID NO: 678 - DNA, 357 bp, Artificial Sequence
  Description of Artificial Sequence: Synthetic polynucleotide
gaggtgcagctgttggagtctgggggaggcttggtacagcctggggggtccctgcgtctctcctgtgcagcctccggattcacctttccgagttatgctatgacgtgggtccgccaggctccagggaagggtctggagtgggtctcacgtattacggcggatggtactgttacatactacgcagactccgtgaagggccggttcaccatctcccgcgacaattccaagaacacgctgtatctgcaaatgaacagcctgcgtgccgaggacaccgcggtatattactgtgcgaaaggttctattccgatgcttacgtttgactactggggtcagggaaccctggtcaccgtctcgagc

SEQ ID NO: 679 - DNA, 360 bp, Artificial Sequence
  Description of Artificial Sequence: Synthetic polynucleotide
gaggtgcagctgttggagtctgggggaggcttggtacagcctggggggtccctgcgtctctcctgtgcagcctccggattcaccttttcgacttatgatatgatttgggtccgccaggctccagggaagggtctagagtgggtctcagctatttctcctaatggtactggtatatactacgcagactccgtgaagggccggttcaccatctcccgcgacaattccaagaacacgctgtatctgcaaatgaacagcctgcgtgccgaggacaccgcggtatattactgtgcgaaaaatcagagtgttcatcatgctgtttttgactactggggtcagggaaccctggtcaccgtctcgagc

SEQ ID NO: 680 - DNA, 357 bp, Artificial Sequence
  Description of Artificial Sequence: Synthetic polynucleotide
gaggtgcagctgttggagtctgggggaggcttggtacagcctggggggtccctgcgtctctcctgtgcagcctccggattcacctttgagaattatgagatgacgtgggtccgccaggctccagggaagggtctagagtgggtctcacgtattgcgccgcatggtcggcttacatactacgcagactccgtgaagggccggttcaccatctcccgcgacaattccaagaacacgctgtatctgcaaatgaacagcctgcgtgccgaggataccgcggtatattactgtgcgaaaggtcagattccgatgcttgattttgactactggggtcagggaaccctggtcaccgtctcgagc

SEQ ID NO: 681 - DNA, 363 bp, Artificial Sequence
  Description of Artificial Sequence: Synthetic polynucleotide
gaggtgcagctgttggagtctgggggaggcttggtacagcctggggggtccctgcgtctctcctgtgcagcctccggattcaccttttcgcattatatgatgatgtgggtccgccaggctccagggaagggtctagagtgggtctcaacgatttctcattttggtgatattacatactacgcagactccgtgaagggccggttcaccatctcccgcgacaattccaagaacacgctgtatctgcaaatgaacagcctgcgtgccgaggataccgcggtatattactgtgcgaaaaatgatatggtgatgaagaatggggggtttgactactggggtcagggaaccctggtcaccgtctcgagc

SEQ ID NO: 682 - DNA, 357 bp, Artificial Sequence
  Description of Artificial Sequence: Synthetic polynucleotide
gaggtgcagctgttggagtctgggggaggcttggtacagcctggggggtccctgcgtctctcctgtgcagcctccggattcacctttgagaggtatgatatgagttgggtccgccaggctccagggaagggtctagagtgggtctcacgtattgattcgcggggttggtctacatactacgcagactccgtgaagggccggttcaccatctcccgcgacaattccaagaacacgctgtatctgcaaatgaacagcctgcgtgccgaggacaccgcggtatattactgtgcgaaagggttggtgccgcatctgaggtttgactactggggtcagggaaccctggtcaccgtctcgagc

SEQ ID NO: 683 - DNA, 351 bp, Artificial Sequence
  Description of Artificial Sequence: Synthetic polynucleotide
gaggtgcagctgttggagtctgggggaggcttggtacagcctggggggtccctgcgtctctcctgtgcagcctccggattcacctttgcgaatgcgcagatgacttgggtccgccaggctccagggaagggtctagagtgggtctcaaggattgatgctatgggtgatgctacatactacgcagactccgtgaagggccggttcaccatctcccgcgacaattccaagaacacgctgtatctgcaaatgaacagcctgcgtgccgaggacaccgcggtatattactgtgcgaaaggtaaggttccgagtattgactactggggtcagggaaccctggtcaccgtctcgagc

SEQ ID NO: 684 - DNA, 351 bp, Artificial Sequence
  Description of Artificial Sequence: Synthetic polynucleotide
gaggtgcagctgttggagtctgggggaggcttggtacagcctggggggtccctgcgtctctcctgtgcagcctccggattcacctttgcgaatgcgcagatgacttgggtccgccaggctccagggaagggtctagagtgggtctcaaggattgatgctatgggtgatgctacatactacgcagactccgtgaagggccggttcaccatctcccgcgacaattccaagaacacgctgtatctgcaaatgaacagcctgcgtgccgaggataccgcggtatattactgtgcgaaaggtgttattccggcgtttgactactggggtcagggaaccctggtcaccgtctcgagc

SEQ ID NO: 685 - DNA, 354 bp, Artificial Sequence
  Description of Artificial Sequence: Synthetic polynucleotide
gaggtgcagctgttggagtctgggggaggcttggtacagcctggggggtccctgcgtctctcctgtgcagcctccggattcacctttcagaatgatcggatgcattgggtccgccaggctccagggaagggtctagagtgggtctcatcgatttctgctactggtggtgatacatactacgcagactccgtgaagggccggttcaccatctcccgcgacaattccaagaacacgctgtatctgcaaatgaacagcctgcgtgccgaggacaccgcggtatattactgtgcgaaacagacgggtacgaatcgttttgactactggggtcagggaaccctggtcaccgtctcgagc

SEQ ID NO: 686 - DNA, 357 bp, Artificial Sequence
  Description of Artificial Sequence: Synthetic polynucleotide
gaggtgcagctgttggagtctgggggaggcttggtacagcctggggggtccctgcgtctctcctgtgcagcctccggattcacctttaatcagccttatatgtcgtgggtccgccaggctccagggaagggtctggagtgggtctcatctattgatgcttcgggtggtactacatactacgcagactccgtgaagggccggttcaccatctcccgcgacaattccaagaacacgctgtatctgcaaatgaacagcctgcgtgccgaggacgccgcggtatattactgtgcgaaagatcgtattcctaatcttgtgtttgactactggggtcagggaaccctggtcaccgtctcgagc

SEQ ID NO: 687 - DNA, 357 bp, Artificial Sequence
  Description of Artificial Sequence: Synthetic polynucleotide
gaggtgcagctgttggagtctgggggaggcttggtacagcctggggggtccctgcgtctctcctgtgcagcctccggattcacctttgataatgagaatatgacttgggtccgccaggctccagggaagggtctagagtgggtctcacgtattgatggtgggggttataatacatactacgcagactccgtgaagggccggttcaccatctcccgcgacaattccaagaacacgctgtatctgcaaatgaacagcctgcgtgccgaggacaccgcggtatattactgtgcgaaagggcaggttcctgagctgctgtttgactactggggtcagggaaccctggtcaccgtctcgagc

SEQ ID NO: 688 - DNA, 357 bp, Artificial Sequence
  Description of Artificial Sequence: Synthetic polynucleotide
gaggtgcagctgttggagtctgggggaggcttggtacagcctggggggtccctgcgtctctcctgtgcagcctccggattcacctttgtttcgtcgaatatgacttgggtccgccaggctccagggaagggtctagagtgggtctcagctattagtggtagtggtggtagcacatactatgcagactccgtgaagggccggttcaccatctcccgcgacaattccaagaacacgctgtatctgcaaatgaacagcctgcgtgccgaggacaccgcggtatattactgtgcgaaaggtcggattcctacgttggtgtttgactactggggtcagggaaccctggtcaccgtctcgagc

SEQ ID NO: 689 - DNA, 357 bp, Artificial Sequence
  Description of Artificial Sequence: Synthetic polynucleotide
gaggtgcagctgttggagtctgggggaggcttggtacagcctggggggtccctgcgtctctcctgtgcagcctccggattcacctttgtttcgtcgaatatgacttgggtccgccaggctccagggaagggtctagagtgggtctcagctattagtggtagtggtggtagcacatactatgcagactccgtgaagggccggttcaccatctcccgcgacaattccaagaacacgctgtatctgcaaatgaacagcctgcgtgccgaggacaccgcggtatattactgtgcgaaagatcgtattcctaatcttgtgtttgactactggggtcagggaaccctggtcaccgtctcgagc

SEQ ID NO: 690 - DNA, 357 bp, Artificial Sequence
  Description of Artificial Sequence: Synthetic polynucleotide
gaggtgcagctgttggagtctgggggaggcttggtacagcctggggggtccctgcgtctctcctgtgcagcctccggattcaccttttctgatgattcgatgagttgggtccgccaggctccagggaagggtctagagtgggtctcacgtattaatgatgctggtagttctacatactacgcagactccgtgaagggccggttcaccatctcccgcgacaattccaagaacacgctgtatctgcaaatgaacagcctgcgtgccgaggacaccgcggtatattactgtgcgaaaggtactattcctcttctggagtttgactactggggtcagggaaccctggtcaccgtctcgagc

SEQ ID NO: 691 - DNA, 357 bp, Artificial Sequence
  Description of Artificial Sequence: Synthetic polynucleotide
gagatgcagctgttggagtctgggggaggcttggtacagcctggggggtccctgcgtctctcctgtgcagcctccggattcacctttgtttcggatactatgagttgggtccgccaggctccagggaagggtctagagtgggtctcacgtattgatgggactggtggtgatacatactacgcagactccgtgaagggccggttcaccatctcccgcgacaattccaagaacacgctgtatctgcaaatgaacagcctgcgtgccggggacaccgcggtatattactgtgcgaaagggcttattcctgatcttcagtttgactactggggtcagggaaccctggtcaccgtctcgagc

SEQ ID NO: 692 - DNA, 357 bp, Artificial Sequence
  Description of Artificial Sequence: Synthetic polynucleotide
gaggtgcagctgttggagtctgggggaggcttggtacagcctggggggtccctgcgtctctcctgtgcagcctccggattcacctttgatgaggaggagatgacgtgggtccgccaggctccagggaagggtctagagtgggtctcacgtattattggtggtggtcatgagacatactacgcagactccgtgaagggccggttcaccatctcccgcgacaattccaagaacacgctgtatctgcaaatgaacagcctgcgtgccgaggacaccgcggtatattactgtgcgaaaggtactattcctcttctggagtttgactactggggtcagggaaccctggtcaccgtctcgagc

SEQ ID NO: 693 - DNA, 357 bp, Artificial Sequence
  Description of Artificial Sequence: Synthetic polynucleotide
gaggtgcagctgttggagtctgggggaggcttggtacagcctggggggtccctgcgtctctcctgtgcagcctccggattcacctttgataatgagaatatgacttgggtccgccaggctccagggaaggatctagagtgggtctcacggattactgagaggggtgatgtgacatactacgcagactccgtgaagggccggttcaccatctcccgcgacaattccaagaacacgctgtatctgcaaatgaacagcctgcgtgccgaggacaccgcggtatattactgtgcgaaaggtactgttcctacgctggagtttgactactggggtcagggaaccctggtcaccgtctcgagc

SEQ ID NO: 694 - DNA, 357 bp, Artificial Sequence
  Description of Artificial Sequence: Synthetic polynucleotide
gaggtgcagctgttggagtctgggggaggcttggtacagcctggggggtccctgcgtctctcctgtgcagcctccggattcacctttgatgaggaggagatgacgtgggtccgccaggctccagggaagggtctagagtgggtctcacgtattattggtggtggtcatgagacatactacgcagactccgtgaagggccggttcaccatctcccgcgacaattccaagaacacgctgtatctgcaaatgaacagcctgcgtgccgaggacaccgcggtatattactgtgcgaaaggtactgttcctacgctggagtttgactactggggtcagggaaccctggtcaccgtctcgagc

SEQ ID NO: 695 - DNA, 357 bp, Artificial Sequence
  Description of Artificial Sequence: Synthetic polynucleotide
gaggtgcagctgttggagtctgggggaggcttggtacagcctggggggtccctgcgtctctcctgtgcagcctccggattcacctttcatgagacggagatgacgtgggtccgccaggctccagggaagggtctagagtgggtctcagctattaatcggctgggtcaggatacatactacgcagactccgtgaagggccggttcaccatctcccgcgacaattccaagaacacgctgtatctgcaaatgaacagcctgcgtgccgaggacaccgcggtatattactgtgcgaaaggtaggattcctgggctggtttttgactactggggtcagggaaccctggtcaccgtctcgagc

SEQ ID NO: 696 - DNA, 357 bp, Artificial Sequence
  Description of Artificial Sequence: Synthetic polynucleotide
gaggtgcagctgttggagtctgggggaggcttggtacagcctggggggtccctgcgtctctcctgtgcagcctccggattcaccttttctgatgattcgatgagttgggtccgccaggctccagggaagggtctagagtgggtctcacgtattaatgatgctggtagttctacatactacgcagactccgtgaagggccggttcaccatctcccgcgacaattccaagaacacgctgtatctgcaaatgaacagcctgcgtgccgaggacaccgcggtatattactgtgcgaaaggtactgttcctacgctggagtttgactactggggtcagggaaccctggtcaccgtctcgagc

SEQ ID NO: 697 - DNA, 357 bp, Artificial Sequence
  Description of Artificial Sequence: Synthetic polynucleotide
gaggtgcagctgttggagtctgggggaggcttggtacagcctggggggtccctgcgtctctcctgtgcagcctccggattcacctttgataatgagaatatgacttgggtccgccaggctccagggaaggatctagagtgggtctcacggattactgagaggggtgatgtgacatactacgcagactccgtgaagggccggttcaccatctcccgcgacaattccaagaacacgctgtatctgcaaatgaacagcctgcgtgccgaggacaccgcggtatattactgtgcgaaaggtcggattcctacgttggtgtttgactactggggtcagggaaccctggtcaccgtctcgagc

SEQ ID NO: 698 - DNA, 357 bp, Artificial Sequence
  Description of Artificial Sequence: Synthetic polynucleotide
gaggtgcagctgttggagtctgggggaggcttggtacagcctggggggtccctgcgtctctcctgtgcagcctccggattcaccttttctgatgattcgatgagttgggtccgccaggctccagggaagggtctagagtgggtctcacgtattaatgatgctggtagttctacatactacgcagactccgtgaagggccggttcaccatctcccgcgacaattccaagaacacgctgtatctgcaaatgaacagcctgcgtgccgaggacaccgcggtatattactgtgcgaaagggattactcctaatttgacttttgactactggggtcagggaaccctggtcaccgtctcgagc

SEQ ID NO: 699 - DNA, 357 bp, Artificial Sequence
  Description of Artificial Sequence: Synthetic polynucleotide
gaggtgcagctgttggagtctgggggaggcttggtacagcctggggggtccctgcgtctctcctgtgcagcctccggattcacctttgctgatgagccgatgacttgggtccgccaggctccagggaagggtctagagtgggtctcacgtattcctcctgagggtgctccgacatactacgcagactccgtgaagggccggttcaccatctcccgcgacaattccaagaacacgctgtatctgcaaatgaacagcctgcgtgccgaggacaccgcggtatattactgtgcgaaagggcttattcctgatcttcagtttgactactggggtcagggaaccctggtcaccgtctcgagc

SEQ ID NO: 700 - DNA, 357 bp, Artificial Sequence
  Description of Artificial Sequence: Synthetic polynucleotide
gaggtgcagctgttggagtctgggggaggcttggtacagcctggggggtccctgcgtctctcctgtgcagcctccggattcacctttcaggatagtgatatgacgtgggtccgccaggctccagggaagggtctagagtgggtctcagctattgctgcgcctggtggtagtacatactacgcagactccgtgaagggccggttcaccatctcccgcgacaattccaagaacacgctgtatctgcaaatgaacagcctgcgtgccgaggacaccgcggtatattactgtgcgaaagatcgtattcctaatcttaggtttgactactggggtcagggaaccctggtcaccgtctcgagc

SEQ ID NO: 701 - DNA, 357 bp, Artificial Sequence
  Description of Artificial Sequence: Synthetic polynucleotide
gaggtgcagctgttggagtctgggggaggcttggtacagcctggggggtccctgcgtctctcctgtgcagcctccggattcacctttgtttcggatactatgagttgggtccgccaggctccagggaagggtctagagtgggtctcacgtattgatgggactggtggtgatacatactacgcagactccgtgaagggccggttcaccatctcccgcgacaattccaagaacacgctgtatctgcaaatgaacagcctgcgtgccgaggacaccgcggtatattactgtgcgaaagggcaggttcctgagctgctgtttgactactggggtcagggaaccctggtcaccgtctcgagc

SEQ ID NO: 702 - DNA, 357 bp, Artificial Sequence
  Description of Artificial Sequence: Synthetic polynucleotide
gaggtgcagctgttggagtctgggggaggcttggtacagcctggggggtccctgcgtctctcctgtgcagcctccggattcacctttcaggatagtgatatgacgtgggtccgccaggctccagggaagggtctagagtgggtctcagctattgctgcgcctggtggtagtacatactacgcagactccgtgaagggccggttcaccatctcccgcgacaattccaagaacacgctgtatctgcaaatgaacagcctgcgtgccgaggataccgcggtatattactgtgcgaaagatcgtattcctaatcttgtgtttgactactggggtcagggaaccctggtcaccgtctcgagc

SEQ ID NO: 703 - DNA, 357 bp, Artificial Sequence
  Description of Artificial Sequence: Synthetic polynucleotide
gaggtgcagctgttggagtctgggggaggcttggtacagcctggggggtccctgcgtctctcctgtgcagccgccggattcacctttgatctggcggagatgacttgggtccgccaggctccagggaagggtctagagtgggtctcacgtattgatgaggatggtgcttctacatactacgcagactccgtgaagggccggttcaccatctcccgcgacaattccaagaacacgctgtatctgcaaatgaacagcctgcgtgccgaggacgccgcggtatattactgtgcggaaggtgttattccgtctctgacttttgactactggggtcagggaaccctggtcaccgtctcgagc

SEQ ID NO: 704 - DNA, 357 bp, Artificial Sequence
  Description of Artificial Sequence: Synthetic polynucleotide
gaggtgcagctgttggagtctgggggaggcttggtacagcctggggggtccctgcgtctctcctgtgcagcctccggattcacctttactgataagcatatgagttgggtccgccaggctccagggaagggtctagagtgggtctcacggatttcgcctgatggtacgtatacatactacgcagactccgtgaagggccggttcaccatctcccgcgacaattccaagaacacgctgtatctgcaaatgaacagcctgcgtgccgaggacgccgcggtatattactgtgcggaaggtgttattccgtctctgacttttgactactggggtcagggaaccctggtcaccgtctcgagc

SEQ ID NO: 705 - DNA, 357 bp, Artificial Sequence
  Description of Artificial Sequence: Synthetic polynucleotide
gaggtgcagctgttggagtctgggggaggcttggtacagcctggggggtccctgcgtctctcctgtgcagcctccggattcacctttgctgaggatgatatgacttgggtccgccaggctccagggaagggtctagagtgggtctcacgtattgcggttgatggtgatcggacatactacgcagactccgtgaagggccggttcaccatctcccgcgacaattccaagaacacgctgtatctgcaaatgaacagcctgcgtaccgaggacaccgcggtatattactgtgcgaaagggaagacgccgcatcttgtgtttgactactggggtcagggaaccctggtcaccgtctcgagc

SEQ ID NO: 706 - DNA, 357 bp, Artificial Sequence
  Description of Artificial Sequence: Synthetic polynucleotide
gaggtgcagctgttggagtctgggggaggcttggtacagcctggggggtccctgcgtctctcctgtgcagccgccggattcacctttgatctggcggagatgacttgggtccgccaggctccagggaagggtctagagtgggtctcacgtattgatgaggatggtgcttctacatactacgcagactccgtgaagggccggttcaccatctcccgcgacaattccaagaacacgctgtatctgcaaatgaacagcctgcgtgccgaggacaccgcggtatattactgtgcgaaaggtcaggttcctgctttggtttttgactactggggtcagggaaccctggtcaccgtctcgagc

SEQ ID NO: 707 - DNA, 357 bp, Artificial Sequence
  Description of Artificial Sequence: Synthetic polynucleotide
gaggtgcagctgttggagtctgggggaggcttggtacagcctggggggtccctgcgtctctcctgtgcagcctccggattcacctttgaggattcgatgatgtcgtgggtccgccaggcgccagggaagggtctagagtgggtctcacggattgatcctgggggtgctcagacatactacgcagactccgtgaagggccggttcaccatctcccgcgacaattccaagaacacgctgtatctgcaaatgaacagcctgcgtgccgaggacaccgcggtatattactgtgcgaaaggggtgactccggatttgacttttgactactggggtcagggaaccctggtcaccgtctcgagc

SEQ ID NO: 708 - DNA, 357 bp, Artificial Sequence
  Description of Artificial Sequence: Synthetic polynucleotide
gaggtgcagctgttggagtctgggggaggcttggtacagcctggggggtccctgcgtctctcctgtgcagcctccggattcacctttgagcatgcggatatgagttgggtccgccaggcttcagggaagggtctagagtgggtctcacgtattgataatagtggtcagtctacatactacgcagactccgtgaagggccggttcaccatctcccgcgacaattccaagaacacgctgtatctgcaaatgaacagcctgcgtgccgaggacaccgcggtatattactgtgcgaaaggggtgactccggatttgacgtttgactactggggtcagggaaccctggtcaccgtctcgagc

SEQ ID NO: 709 - DNA, 357 bp, Artificial Sequence
  Description of Artificial Sequence: Synthetic polynucleotide
gaggtgcagctgttggagtctgggggaggcttggtacagcctggggggtccctgcgtctctcctgtgcagcctccggattcacctttagtgaggcggagatgaattgggtccgccaggctccagggaagggtctagagtgggtctcacgtattacgacggatggtgattctacatactacgcagactccgtgaagggccggttcaccatctcccgcgacaattccaagaacacgctgtatctgcaaatgaacagcctgcgtgccgaggacaccgcggtatattactgtgcgaaagggcgtattcctactcttcattttgactactggggtcagggaaccctggtcaccgtctcgagc

SEQ ID NO: 710 - DNA, 357 bp, Artificial Sequence
  Description of Artificial Sequence: Synthetic polynucleotide
gaggtgcagctgttggagtctgggggaggcttggtacagcctggggggtccctgcgtctctcctgtgcagcctcaggattcacctttgatgatagtgatatgacttgggtccgccaggctccagggaagagtctagagtgggtctcatatattcggggtgatgatgatgagacatactacgcagactccgtgaagggccggttcaccatctcccgcgacaattccaagaacacgctgtatctgcaaatgaacagcctgcgtgccgaggacaccgcggtatattactgtgcgaaaaatcggattcctgatcttgtgtttgactactggggtcagggaaccctggtcaccgtctcgagc

SEQ ID NO: 711 - DNA, 363 bp, Artificial Sequence
  Description of Artificial Sequence: Synthetic polynucleotide
gaggtgcagctgttggagtctgggggaggcttggtacagcctggggggtccctgcgtctctcctgtgcagcctccggattcacctttaatgtggcggatatgcagtgggtccgccaggctccagggaagggtctagagtgggtctcaagtattagtccgaatggttgggatacatactacgcagactccgtgaagggccggttcaccatctcccgcgacaattccaagaacacgctgtatctgcaaatgaacagcctgcgtgccgaggacaccgcggtatattactgtgcgaaacatgcttctacggaggggccgactgcttttgactactggggtcagggaaccctggtcaccgtctcgagc

SEQ ID NO: 712 - DNA, 348 bp, Artificial Sequence
  Description of Artificial Sequence: Synthetic polynucleotide
gaggtgcagctgttggagtctgggggaggcttggtacagcctggggggtccctgcgtctctcctgtgcagcctccggattcacctttgggccgtatgatatggggtgggtccgccaggctccagggaagggtctggagtgggtctcatggatttctgctcatggttcgtttacatactacgcagactccgtgaagggccggttcaccatctcccgcgacaattccaagaacacgctgtatctgcaaatgaacagcctgcgtgccgaggataccgcggtatattactgtgcgaaatggccttataagtttgactactggggtcagggaaccctggtcaccgtctcgagc

SEQ ID NO: 713 - DNA, 357 bp, Artificial Sequence
  Description of Artificial Sequence: Synthetic polynucleotide
gaggtgcagctgttggagtctgggggaggcttggtacagcctggggggtccctgcgtctctcctgtgcagcctccggattcacctttgggagtgggtctatgagttgggtccgccaggctccagggaagggtctagagtgggtctcacggattggtagtaatggtgcggatacatactacgcagactccgtgaagggccggttcaccatctcccgcgacaattccaagaacacgctgtatctgcaaatgaacagcctgcgtgccgaggacaccgcggtatattactgtgcgaaagggatggttcctaatttggtttttgactactggggtcagggaaccctggtcaccgtctcgagc

SEQ ID NO: 714 - DNA, 357 bp, Artificial Sequence
  Description of Artificial Sequence: Synthetic polynucleotide
gaggtgcagctgttggagtctgggggaggcttggtacagcctggggggtccctgcgtctctcctgtgcagcctccggattcacctttaatcgttttgatatgacgtgggtccgccaggctccagggaagggtctagagtgggtctcagctattagtggtagtggtggtagcacatactacgcagactccgtgaagggccggttcaccatctcccgcgacaattccaagaacacgctgtatctgcaaatgaacagcctgcgtgccgaggacaccgcggtatattactgtgcgaaagatcgtattcctaatcttgtgtttgactactggggtcagggaaccctggtcaccgtctcgagc

SEQ ID NO: 715 - DNA, 357 bp, Artificial Sequence
  Description of Artificial Sequence: Synthetic polynucleotide
gaggtgcagctgttggagtctgggggaggcttggtacagcctggggggtccctgcgtctctcctgtgcagcctccggattcacctttggggagagtgatatgaagtgggtccgccaggctccagggaagggtctagagtgggtctcaagtattagtccgaatggttgggatacatactacgcagactccgtgaagggccggttcaccatctcccgcgacaattccaagaacacgctgtatctgcaaatgaacagcctgcgtgccgaggacaccgcggtatattactgtgcgaaatctccttcttctcgtcttaagtttgactactggggtcagggaaccctggtcaccgtctcgagc

SEQ ID NO: 716 - DNA, 357 bp, Artificial Sequence
  Description of Artificial Sequence: Synthetic polynucleotide
gaggtgcagctgttggagtctgggggaggcttggtacagcctggggggtccctgcgtctctcctgtgcagcctccggattcacctttgatagtagtgagatgagttgggtccgccaggctccagggaagggtctagagtgggtctcatcgattgagaatcagggtggtgcgacatactacgcagactccgtgaagggccggttcaccatctcccgcgacaattccaagaacacgctgtatctgcaaatgaacagcctgcgtgccgaggataccgcggtatattactgtgcgaaagatcgtattcctaatcttgtgtttgactactggggtcagggaaccctggtcaccgtctcgagc

SEQ ID NO: 717 - DNA, 348 bp, Artificial Sequence
  Description of Artificial Sequence: Synthetic polynucleotide
gaggtgcagctgttggagtctgggggaggcttggtacagcctggggggtccctgcgtctctcctgtgcagcctccggattcacccttgatgcgtatcctatgtattgggtccgccaggctccagggaagggtctagagtgggtctcatggattgcttcgggtggtggtgcgacatactacgcagactccgtgaagggccggttcaccatctcccgcgacaattccaagaacacgctgtatctgcaaatgaacagcctgcgtgccgaggacaccgcggtatattactgtgcgaaacgtacgaagaattttgactactggggtcagggaaccctggtcaccgtctcgagc

SEQ ID NO: 718 - DNA, 360 bp, Artificial Sequence
  Description of Artificial Sequence: Synthetic polynucleotide
gaggtgcagctgttggagtctgggggaggcttggtacagcctggggggtccctgcgtctctcctgtgcagcctccggattcacctttatgagttattctatggcttgggtccgccaggctccagggaagggtctagagtgggtctcagggattacttctaatggtaatcggacatactacgcagactccgtgaagggccggttcaccatctcccgcgacaattccaagaacacgctgtatctgcaaatgaacagcctgcgtgccgaggataccgcggtatattactgtgcgaaatcgactggggctaatagtaggaattttgactactggggtcagggaaccctggtcaccgtctcgagc

SEQ ID NO: 719 - DNA, 363 bp, Artificial Sequence
  Description of Artificial Sequence: Synthetic polynucleotide
gaggtgcagctgttggagtctgggggaggcttggtacagcctggggggtccctgcgtctctcctgtgcagcctccggattcacctttgaggggtatctgatgtcgtgggtccgccaggctccagggaagggtctagagtgggtctcaagtattgcggctaatggtatgcagacatactacgcagactccgtgaagggccggttcaccatctcccgcgacaattccaagaacacgctgtatctgcaaatgaacagcctgcgtgccgaggacaccgcggtatattactgtgcgaaaaagccgaggggtatttgggatggggattttgactactggggtcagggaaccctggtcaccgtctcgagc

SEQ ID NO: 720 - DNA, 357 bp, Artificial Sequence
  Description of Artificial Sequence: Synthetic polynucleotide
gaggtgcagctgttggagtctgggggaggcttggtacagcctggggggtccctgcgtctctcctgtgcagcctccggattcacctttcatgagtctacgatgacgtgggtccgccaggctccagggaagggtctagagtgggtctcaactattcggcatccgggtgagtttacatactacgcagactccgtgaagggccggttcaccatctcccgcgacaattccaagaacacgctgtatctgcaaatgaacagcctgcgtgccggggacaccgcggtatattactgtgcgaaagggcttattcctgatcttcagtttgactactggggtcagggaaccctggtcaccgtctcgagc

SEQ ID NO: 721 - DNA, 363 bp, Artificial Sequence
  Description of Artificial Sequence: Synthetic polynucleotide
gaggtgcagctgttggagtctgggggaggcttggtacagcctggggggtccctgcgtctctcctgtgcagcctccggattcacctttgcgatgtatagtatgagttgggtccgccaggctccagggaagggtctagagtgggtctcatcgattgcgccgccgggtggtaggacatactacgcagactccgtgaagggccggttcaccatctcccgcgacaattccaagaacacgctgtatctgcaaatgaacagcctgcgtgccgaggataccgcggtatattactgtgcgaaacagtcgctgacggggtatagtaggtcttttgactactggggtcagggaaccctggtcaccgtctcgagc

SEQ ID NO: 722 - DNA, 360 bp, Artificial Sequence
  Description of Artificial Sequence: Synthetic polynucleotide
gaggtgcagctgttggagtctgggggaggcttggtacagcctggggggtccctgcgtctctcctgtgcagcctccggattcaccttttcgcagaatccgatgtcgtgggtccgccacgctccagggaagggtctagagtgggtctcaacgattcctgcgaatggtcgtcctacatcctacgcagactccgtgaagggccggttcaccatctcccgcgacaattccaagaacacgctgtatctgcaaatgaacagcctgcgtgccgaggataccgcggtatattactgtgcgaaatatagtcagcagccgggtcgtcggtttgactactggggtcagggaaccctggtcaccgtctcgagc

SEQ ID NO: 723 - DNA, 357 bp, Artificial Sequence
  Description of Artificial Sequence: Synthetic polynucleotide
gaggtgcagctgttggagtctgggggaggcttggtacagcctggggggtccctgcgtctctcctgtgcagcctccggattcacctttgctaattatcatatgacgtgggtccgccaggctccagggaagggtctagagtgggtctcatcgattcctgatagtggtaagcagacatactacgcagactccgtgaagggccggttcaccatctcccgcgacaattccaagaacacgctgtatctacaaatgaacagcctgcgtgccgaggacaccgcggtatattactgtgcgaaaggtaggattccgtctcttctttttgactactggggtcagggaaccctggtcaccgtctcgagc

SEQ ID NO: 724 - DNA, 360 bp, Artificial Sequence
  Description of Artificial Sequence: Synthetic polynucleotide
gaggtgcagctgttggagtctgggggaggcttggtacagcctggggggtccctgcgtctctcctgtgcagcctccggattcacctttgcgcagtatcatatgcgttgggtccgccaggctccagggaagggtctagagtgggtctcaacgattaatgatattggtagtaatacatactacgcagactccgtgaagggccggttcaccatctcccgcgacaattccaagaacacgctgtatctgcaaatgaacagcctgcgtgccgaggacaccgcggtatattactgtgcgaaagttggggggcgggggagtttttcttttgactactggggtcagggaaccctggtcaccgtctcgagc

SEQ ID NO: 725 - DNA, 360 bp, Artificial Sequence
  Description of Artificial Sequence: Synthetic polynucleotide
gaggtgcagctgttggagtctgggggaggcttggtacagcctggggggtccctgcgtctctcctgtgcagcctccggattcaccttttcttcgtatgatatgaagtgggtccgccaggctccagggaagggtctagagtgggtctcaacgattagtgcgtctggtgtgtttacatactacgcagactccgtgaagggccggttcaccatctcccgcgacaattccaagaacacgctgtatctgcaaatgaacagcctgcgtgccgaggacaccgcggtatattactgtgcgaaacgggagcatgcgggtcagccgccttttgactactggggtcagggaaccctggtcaccgtctcgagc

SEQ ID NO: 726 - DNA, 360 bp, Artificial Sequence
  Description of Artificial Sequence: Synthetic polynucleotide
gaggtgcagctgttggagtctgggggaggcttggtacagcctggggggtccctgcgtctctcctgtgcagcctccggattcacctttaatggttatgctatgagttgggtccgccaggctccagggaagggtctagagtgggtctcaactattaatgctaatggtaagtatacatactacgcagactccgtgaagggccggttcaccatctcccgcgacaattccaagaacacgctgtatctgcaaatgaacagcctgcgtgccgaggacaccgcggtatattactgtgcgaaaaagttgactcttgcttctaattattttgactactggggtcagggaaccctggtcaccgtctcgagc

SEQ ID NO: 727 - DNA, 363 bp, Artificial Sequence
  Description of Artificial Sequence: Synthetic polynucleotide
gaggtgcagctgttggagtctgggggaggcttggtacagcctggggggtccctgcgtctctcctgtgcagcctccggattcacctttatggattatgatatgaagtgggtccgccaggctccagggaagggtctagagtgggtctcaagtattactgcgcttggtaagaagacatactacgcagactccgtgaagggccggttcaccatctcccgcgacaattccaagaacacgctgtatctgcaaatgaacagcctgcgtgccgaggacaccgcggtatattactgtgcgaaagatagtgttaagtatcctcttaatctttttgactactggggtcagggaaccctggtcaccgtctcgagc

SEQ ID NO: 728 - DNA, 360 bp, Artificial Sequence
  Description of Artificial Sequence: Synthetic polynucleotide
gaggtgcagctgttggagtctgggggaggcttggtacagcctggggggtccctgcgtctctcctgtgcagcctccggattcacctttccgcattatacgatggcgtgggtccgccaggctccagggaagggtctggagtgggtctcatctattcagtcgcctggttggcggacatactacgcagactccgtgaagggccggttcaccatctcccgcgacaattccaagaacacgctgtatctgcaaatgaacagcctgcgtgccgaggataccgcggtatattactgtgcgaaatatggggatggtcttcctttgacttttgactactggggtcagggaaccctggtcaccgtctcgagc

SEQ ID NO: 729 - DNA, 357 bp, Artificial Sequence
  Description of Artificial Sequence: Synthetic polynucleotide
gaggtgcagctgttggagtctgggggaggcttggtacagcctggggggtccctgcgtctctcctgtgcagcctccggattcacctttagtggtacgccgatgtcttgggtccgccaggctccagggaagggtctagagtgggtctcacgtattggggatgagggtcaggagacatactacgcagactccgtgaagggccggttcaccatctcccgcgacaattccaagaacacgctgtatctgcaaatgaacagcctgcgtgccgaggacaccgcggtatattactgtgcgaaaggggtgactccggatttgacttttgactactggggtcagggaaccctggtcaccgtctcgagc

SEQ ID NO: 730 - DNA, 357 bp, Artificial Sequence
  Description of Artificial Sequence: Synthetic polynucleotide
gaggtgcagctgttggagtctgggggaggcttggtacagcctggggggtccctgcgtctctcctgtgcagcctccggattcacctttagtagtagttcgatgtcttgggtccgccaggctccagggaagggtctagagtgggtctcagcgattgggtctgatggtccgagtacatactacgcagactccgtgaagggccggttcaccatctcccgcgacaattccaagaacacgctgtatctgcaaatgaacagcctgcgtgccgaggacaccgcggtatattactgtgcgaaagggcgtattcctactcttcattttgactactggggtcagggaaccctggtcaccgtctcgagc

SEQ ID NO: 731 - DNA, 357 bp, Artificial Sequence
  Description of Artificial Sequence: Synthetic polynucleotide
gaggtgcagctgttggagtctgggggaggcttggtacagcctggggggtccctgcgtctctcctgtgcagcctccggattcacctttaatcctggtgagatgacgtgggtccgccaggctccagggaagggtctagagtgggtctcaagtattgatgggtctggttcttcgacatactacgcagactccgtgaagggccggttcaccatctcccgcgacaattccaagaacacgctgtatctgcaaatgaacagcctgcgtgccgatgacaccgcggtatattactgtgcgaaagggcgtattcctactcttcattttgactactggggtcagggaaccctggtcaccgtctcgagc

SEQ ID NO: 732 - DNA, 357 bp, Artificial Sequence
  Description of Artificial Sequence: Synthetic polynucleotide
gaggtgcagctgttggagtctgggggaggcttggtacagcctggggggtccctgcgtctctcctgtgcagcctccggattcacctttcctgagtctatgatggggtgggtccgccaggctccagggaagggtctagagtgggtctcatcgattgggtatcctggtgctactacatactacgcagactccgtgaagggccggttcaccatctcccgcgacaattccaagaacacgctgtatctgcaaatgaacagcctgcgtgccgaggataccgcggtatattactgtgcgaaaggtggtagtcgggatgataattttgactactggggtcagggaaccctggtcaccgtctcgagc

SEQ ID NO: 733 - DNA, 372 bp, Artificial Sequence
  Description of Artificial Sequence: Synthetic polynucleotide
gaggtgcagctgttggagtctgggggaggcttggtacagcctggggggtccctgcgcctctcctgtgcagcctccggattcacctttggtcagcatagtatgcattgggtccgccaggctccagggaagggtctagagtgggtctcaagtattagtgttccgggtccgaagacatactacgcagactccgtgaagggccggttcaccatctcccgcgacaattccaagaacacgctgtatctgcaaatgaacagcctgcgtgccgaggacaccgcggtatattactgtgcgaaaagtcttagggatttgcgtccgggtgatagtaagagttttgactactggggtcagggaaccctggtcaccgtctcgagc

SEQ ID NO: 734 - DNA, 348 bp, Artificial Sequence
  Description of Artificial Sequence: Synthetic polynucleotide
gaggtgcagctgttggagtctgggggaggcttggtacagcctggggggtccctgcgtctctcctgtgcagcctccggattcacctttggttctgctgctatggattgggtccgccaggctccagggaagggtctagagtgggtctcatctattaatgatatgggttctaatacatactacgcagactccgtgaagggccggttcaccatctcccgcgacaattccaagaacacgctgtatctgcaaatgaacagcctgcgtgccgaggacaccgcggtatattactgtgcgaaacagggtggtcgttttgactactggggtcagggaaccctggtcaccgtctcgagc

SEQ ID NO: 735 - DNA, 354 bp, Artificial Sequence
  Description of Artificial Sequence: Synthetic polynucleotide
gaggtgcagctgttggagtctgggggaggcttggtacagcctggggggtccctgcgtctctcctgtgcagcctccggattcacctttggttatgataggatggcttgggtccgccaggctccagggaagggtctagagtgggtctcatcgattgatggtcctggtggggctacatactacgcagactccgtgaagggccggttcaccatctcccgcgacaattccaagaacacgctgtatctgcaaatgaacagcctgcgtgccgaggacaccgcggtatattactgtgcggaagggaggagggttcctgattttgactactggggtcagggaaccctggtcaccgtctcgagc

SEQ ID NO: 736 - DNA, 357 bp, Artificial Sequence
  Description of Artificial Sequence: Synthetic polynucleotide
gaggtgcagctgttggagtctgggggaggcttggtacagcctggggggtccctgcgtctctcctgtgcagcctccggattcacctttggtgagtatgagatgacttgggtccgccaggctccagggaagggtctagagtgggtctcaaggattgatccgtttggttctgagacatactacgcagactccgtgaagggccggttcaccatctcccgcgacaattccaagaacacgctgtatctgcaaatgaacagcctgcgtgccgaggacaccgcggtatattactgtgcggaaggtgtggttcctgatttgaattttgactactggggtcagggaaccctggtcaccgtctcgagc

SEQ ID NO: 737 - DNA, 360 bp, Artificial Sequence
  Description of Artificial Sequence: Synthetic polynucleotide
gaggtgcagctgttggagtctgggggaggcttggtacagcctggggggtccctgcgtctctcctgtgcagcctccggattcacctttgataagtatgttatggggtgggtccgccaggctccagggaagggtctagagtgggtctcaactattggtagttatggtggggctacatactacgcagactccgtgaagggccggttcaccatctcccgcgacaattccaagaacacgctgtatctgcaaatgaacagcctgcgtgccgaggacaccgcggtatattactgtgcgaaaaggcttactcttagtgcgactaagtttgactactggggtcagggaaccctggtcaccgtctcgagc

SEQ ID NO: 738 - DNA, 360 bp, Artificial Sequence
  Description of Artificial Sequence: Synthetic polynucleotide
gaggtgcagctgttggagtctgggggaggcttggtacagcctggggggtccctgcgtctctcctgtgcagcctccggattcacctttgaggattatgtgatgggttgggtccgccaggctccagggaagggtctagagtgggtctcaactattgcgcatcggggtgatattacatactacgcagactccgtgaagggccggttcaccatctcccgcgacaattccaagaacacgctgtatctgcaaatgaacagcctgcgtgccgaggacaccgcggtatattactgtgcgaaacgtaggcgtcttagtgattatcggtttgactactggggtcagggaaccctggtcaccgtctcgagc

SEQ ID NO: 739 - DNA, 357 bp, Artificial Sequence
  Description of Artificial Sequence: Synthetic polynucleotide
gaggtgcagctgttggagtctgggggaggcttggtacagcctggggggtccctgcgtctctcctgtgcagcctccggattcacctttgggcagtttgatatgtattgggtccgccaggctccagggaagggtctagagtgggtctcagcgattagtccggctggtactggtacatactacgcagactccgtgaagggccggttcaccatctcccgcgacaattccaagaacacgctgtatctgcaaatgaacagcctgcgtgccgaggacaccgcggtatattactgtgcgaaagcgggggatcggtctagtctttttgactacaggggtcagggaaccctggtcaccgtctcgagc

SEQ ID NO: 740 - DNA, 354 bp, Artificial Sequence
  Description of Artificial Sequence: Synthetic polynucleotide
gaggtgcagctgttggagtctgggggaggcttggtacagcctggggggtccctgcgtctctcctgtgcagcctccggattcacctttaaggatacgggtatgacgtgggtccgccaggctccagggaagggtctagagtgggtctcaagtatttctagttatggtcgtgatacatactacgcagactccgtgaagggccggttcaccatctcccgcgacaattccaagaacacgctgtatctgcaaatgaacagcctgcgtgccgaggacgccgcggtatattactgtgcgaaattgaatgcggcgctgggttttgactactggggtcagggaaccctggtcaccgtctcgagc

SEQ ID NO: 741 - DNA, 354 bp, Artificial Sequence
  Description of Artificial Sequence: Synthetic polynucleotide
gaggtgcagctgttggagtctgggggaggcttggtacagcctggggggtccctgcgtctctcctgtgcagcctccggattcacctttggtccgtatccgatgagttgggtccgccaggctccagggaagggtctagagtgggtctcaggtattaatgcgccgggtacgaggacatactacgcagactccgtgaagggccggttcaccatctcccgcgacaattccaagaacacgctgtatctgcaaatgaacagcctgcgtgccgaggacaccgcggtatattactgtgcgcaacagatgtctagtggggtttttgactactggggtcagggaaccctggtcaccgtctcgagc

SEQ ID NO: 742 - DNA, 354 bp, Artificial Sequence
  Description of Artificial Sequence: Synthetic polynucleotide
gaggtgcagctgttggagtctgggggaggcttggtacagcctggggggtccctgcgtctctcctgtgcagcctccggattcaccttttcgaatcaggatatgacttgggtccgccaggctccagggaagggtctagagtgggtctcaagtattgatagttctggtcagcttacatactacgcagactccgtgaagggccggttcaccatctcccgcgacaattccaagaacacgctgtatctgcaaatgaacagcctgcgtgccgaggacaccgcggtatattactgtgcgaaagttaagtctcttgcgcggtttgactactggggtcagggaaccctggtcaccgtctcgagc

SEQ ID NO: 743 - DNA, 351 bp, Artificial Sequence
  Description of Artificial Sequence: Synthetic polynucleotide
gaggtgcagctgttggagtctgggggaggcttggtacagcctggggggtccctgcgtctctcctgcgcagcctccggattcacctttcctgagtctgatatgaagtgggtccgccaggctccagggaagggtctagagtgggtctcaagtattagtccgaatggttgggatacatactacgcagactccgtgaagggccggttcaccatctcccgcgacaattccaagaacacgctgtatctgcaaatgaacagcctgcgtgccgaggataccgcggtatattactgtgcgaaaccggctcaggttctgtttgactactggggtcagggaaccctggtcaccgtctcgagc

SEQ ID NO: 744 - DNA, 360 bp, Artificial Sequence
  Description of Artificial Sequence: Synthetic polynucleotide
gaggtgcagctgttggagtctgggggaggcttggtacagcctggggggtccctgcgtctctcctgtgcagcctccggattcacctttgagcagtatgtgatgggttgggtccgccaggctccagggaagggtctagagtgggtctcaacgattggtacgtcgggtaagtatacatactacgcagactccgtgaagggccggttcaccatctcccgcgacaattccaagaacacgctgtatctgcaaatgaacagcctgcgtgccgaggacaccgcggtatattactgtgcgcaacgtaggtctctgactcgggttcattttgactactggggtcagggaaccctggtcaccgtctcgagc

SEQ ID NO: 745 - DNA, 357 bp, Artificial Sequence
  Description of Artificial Sequence: Synthetic polynucleotide
gaggtgcagctgttggagtctgggggaggcttggtacagcctggggggtccctgcgtctctcctgtgcagcctccggattcacctttggtgtggagcatatgagttgggtccgccaggctccagggaagggtctagagtgggtctcagcgattacgggtgatggtgatcgtacatactacgcagactccgtgaagggccggttcaccatctcccgcgacaattccaagaacacgctgtatctgcaaatgaacagcctgcgtgccgaggacaccgcggtatattactgtgcgaaaacggtttcgtggaatggtcgttttgactactggggtcagggaaccctggtcaccgtctcgagc

SEQ ID NO: 746 - DNA, 351 bp, Artificial Sequence
  Description of Artificial Sequence: Synthetic polynucleotide
gaggtgcagctgttggagtctgggggaggcttggtacagcctggggggtccctgcgtctctcctgtgcagcctccggattcacctttgcgtggtataatatgggttgggtccgccaggctccagggaagggtctggagtgggtctcaaggattgctccgtctggtattattacatactacgcagactccgtgaagggccggttcaccatctcccgcgacaattccaagaacacgctgtatctgcaaatgaacagcctgcgtgccgaggacaccgcggtatattactgtgcgaaagggttgcgtggtaagtttgactactggggtcagggaaccctggtcaccgtctcgagc

SEQ ID NO: 747 - DNA, 348 bp, Artificial Sequence
  Description of Artificial Sequence: Synthetic polynucleotide
gaggtgcagctgttggagtctgggggaggcttggtacagcctggggggtccctgcgtctctcctgtgcagcctccggattcaccttttcgaattatgagatgaggtgggtccgccaggctccagggaagggtctagagtgggtctcatctatttcttcggctggtactgatacatactacgcagactccgtgaagggccggttcaccatctcccgcgacaattccaagaacacgctgtatctgcaaatgaacagcctgcgtgccgaggacaccgcggtatattactgtgcgaaacagtcgcttaattttgactactggggtcagggaaccctggtcaccgtctcgagc

SEQ ID NO: 748 - DNA, 348 bp, Artificial Sequence
  Description of Artificial Sequence: Synthetic polynucleotide
gaggtgcagctgttggagtctgggggaggcttggtacagcctggggggtccctgcgtctctcctgtgtagcctccggattcacctttgatgaggagccgatgacttgggtccgccaggctccagggaagggtctagagtgggtctcaattattgatccgggtggtggggcgacatactacgcagactccgtgaagggccggttcaccatctcccgcgacaattccaagaacacgctgtatctgcaaatgaacagcctgcgtgccgaggacaccgcggtatattactgtgcgaaatctaatagtatgtttgactactggggtcagggaaccctggtcaccgtctcgagc

SEQ ID NO: 749 - DNA, 363 bp, Artificial Sequence
  Description of Artificial Sequence: Synthetic polynucleotide
gaggtgcagctgttggagtctgggggaggcttggtacagcctggggggtccctgcgtctctcctgtgcagcctccggattcaccttttctgcgtatcctatgcattgggtccgccaggctccagggaagggtctagagtgggtctcatctattgcttcttcgggtattacgacatactacgcagactccgtgaagggccggttcaccatctcccgcgacaattccaagaacacgctgtatctgcaaatgaacagcctgcgtgccgaggacaccgcggtatattactgtgcgaaatttactcggctgcattttcctgcgcagtttgactactggggtcagggaaccctggtcaccgtctcgagc

SEQ ID NO: 750 - DNA, 357 bp, Artificial Sequence
  Description of Artificial Sequence: Synthetic polynucleotide
gaggtgcagctgttggagtctgggggaggcttggtacagcctggggggtccctgcgtctctcctgtgcagcctccggattcacctttgctgattatgcgatgggttgggtccgccaggctccagggaagggtctagagtgggtctcaaggatttctcctgagggttctaggacatactacgcagactccgtgaagggccggttcaccatctcccgcgacaattccaagaacacgctgtatctgcaaatgaacagcctgcgtgccgaggacaccgcggtatattactgtgcgaaattgcggccgtatgcgtcgaagtttgactactggggtcagggaaccctggtcaccgtctcgagc

SEQ ID NO: 751 - DNA, 348 bp, Artificial Sequence
  Description of Artificial Sequence: Synthetic polynucleotide
gaggtgcagctgttggagtctgggggaggcttggtacagcctggggggtccctgcgtctctcctgtgcagcctccggattcacctttaggccgtatgatatgggttgggtccgccaggctccagggaagggtctagagtgggtctcaacgatttctcatcagggtaatcggacatactacgcagactccgtgaagggccggttcaccatctcccgcgacaattccaagaacacgctgtatctgcaaatgaacagcctgcgtgccgaggacaccgcggtatattactgtgcgaaagtgtctcatcattttgactactggggtcagggaaccctggtcaccgtctcgagc

SEQ ID NO: 752 - DNA, 354 bp, Artificial Sequence
  Description of Artificial Sequence: Synthetic polynucleotide
gaggtgcagctgttggagtctgggggaggcttggtacagcctggggggtccctgcgtctctcctgtgcagcctccggattcaccttttctgcgtataatatgtggtgggcccgccaggctccagggaagggtttagagtgggtctcatggattaattcgactggttctcgtacatactacgcagactccgtgaagggccggttcaccatctcccgcgacaattccaagaacacgctgtatctgcaaatgaacagcctgcgtgccgaggataccgcggtatattactgtgcgaaaaattggcatcgggggaggtttgactactggggtcagggaaccctggtcaccgtctcgagc

SEQ ID NO: 753 - DNA, 351 bp, Artificial Sequence
  Description of Artificial Sequence: Synthetic polynucleotide
gaggtgcagctgttggagtctgggggaggcttggtacagcctggggggtccctgcgtctctcctgtgcagcctccggattcacctttgataggtatcggatggggtgggtccgccaggctccagggaagggtctagagtgggtctcaacgattaatcggctgggtcagagtacatactacgcagactccgtgaagggccggttcaccatctcccgcgacaattccaagaacacgctgtatctgcaaatgaacagcctgcgtgccgaggacaccgcggtatattactgtgcgaaagtgaagaagcataagtttgactactggggtcagggaaccctggtcaccgtctcgagc

SEQ ID NO: 754 - DNA, 351 bp, Artificial Sequence
  Description of Artificial Sequence: Synthetic polynucleotide
gaggtgcagctgttggagtctgggggaggcttggtacagcctggggggtccctgcgtctctcctgtgcagcctccggattcacctttgcgcattataatatgcggtgggtccgccaggctccagggaagggtctagagtgggtctcaacgattacgaagactggttttcgtacatactacgcagactccgtgaagggccggttcaccatctcccgtgacaattccaagaacacgctgtatctgcaaatgaacagcctgcgtgccgaggacaccgcggtatattactgtgcgaaagcggggcagtttgattttgactactggggtcagggaaccctggtcaccgtctcgagc

SEQ ID NO: 755 - DNA, 354 bp, Artificial Sequence
  Description of Artificial Sequence: Synthetic polynucleotide
gaggtgcagctgttggagtctgggggaggcttagtacagcctggggggtccctgcgtctctcctgtgcagcctccggattcaccttttatccttatagtatgcattgggtccgccaggctccagggaagggtctggagtgggtctcaactattgatggtagtggtatgtttacatactacgcagactccgtgaagggccggttcaccatctcccgcgacaattccaagaacacgctgtatctgcaaatgaacagcctgcgtgccgaggacaccgcggtatattactgtgcggaagattctctgaaggcttcttttgactactggggtcagggaaccctggtcaccgtctcgagc

SEQ ID NO: 756 - DNA, 351 bp, Artificial Sequence
  Description of Artificial Sequence: Synthetic polynucleotide
gaggtgcagctgttggagtctgggggaggcttggtacagcctggggggtccctgcgtctctcctgtgcagcctccggattcacctttccgctttatgggatgtggtgggtccgccaggctccagggaagggtctagagtgggtctcatatattgggccttatggtcatactacatactacgcagactccgtgaagggccggttcaccatctcccgcgacaattccaagaacacgctgtatctgcaaatgaacagcctgcgtgccgaggataccgcggtatattactgtgcgaaaaagcggaagaagaagtttgactactggggtcagggaaccctggtcaccgtctcgagc

SEQ ID NO: 757 - DNA, 351 bp, Artificial Sequence
  Description of Artificial Sequence: Synthetic polynucleotide
gaggtgcagctgttggagtctgggggaggcttggtacagcctggggggtccctgcgtctctcctgtgcagcctccggattcacctttcctaggtatcggatgagttgggtccgccaggctccagggaagggtctagagtgggtctcaagtattactccgtatggtgctcatacatactacgcagactccgtgaagggccggttcaccatctcccgcgacaattccaagaacacgctgtatctgcaaatgaacagcctgcgtgccgaggacaccgcggtatattactgtgcgaaatatggtaagtggtattttgactactggggtcagggaaccctggtcaccgtctcgagc

SEQ ID NO: 758 - DNA, 351 bp, Artificial Sequence
  Description of Artificial Sequence: Synthetic polynucleotide
gaggtgcagctgttggagtctgggggaggcttggtacagcctggggggtccctgcgtctctcctgtgcagcctccggattcacctttaatgagtatgcgatgaggtgggtccgccaggctccagggaagggtctagagtgggtctcaacgattgatcgtctgggtcttcatacatactacgcagactccgtgaagggccggttcaccatctcccgcgacaattccaagaacacgctgtatctgcaaatgaacagcctgcgtgccgaggacaccgcggtatattactgtgcgaaaagtgggccttttacgtttgactactggggtcagggaaccctggtcaccgtctcgagc

SEQ ID NO: 759 - DNA, 351 bp, Artificial Sequence
  Description of Artificial Sequence: Synthetic polynucleotide
gaggtgcagctgttggagtctgggggaggcttggtacagcctggggggtccctgcgtctctcctgtgcagcctccggattcacctttgagcggtataatatgcgttgggtccgccaggctccagggaagggtctagagtgggtctcaacgattgatcggctgggtcttgctacatactacgcagactccgtgaagggccggttcaccatctcccgcgacaattccaagaacacgctgtatctgcaaatgaacagcctgcgtgccgaggacaccgcggtatattactgtgcgaaagcgggttcgtggtcttttgactactggggtcagggaaccctggtcaccgtctcgagc

SEQ ID NO: 760 - DNA, 354 bp, Artificial Sequence
  Description of Artificial Sequence: Synthetic polynucleotide
gaggtgcagctgttggagtctgggggaggcttggtacagcctggggggtccctgcgtctctcctgtgcagcctccggattcacctttggtatttatgatatgaagtgggtccgccaggctccagggaagggtctagagtgggtctcaacgatttcgtcgtcgggtactcatacatactacgcagactccgtgaagggccggttcaccatctcccgcgacaattccaagaacacgctgtatctgcaaatgaacagcctgcgtgccgaggacaccgcggtatattactgtgcgaaatatcctcagccttatccttttgactactggggtcagggaaccctggtcaccgtctcgagc

SEQ ID NO: 761 - DNA, 354 bp, Artificial Sequence
  Description of Artificial Sequence: Synthetic polynucleotide
gaggtgcagctattggagtctgggggaggcttggtacagcctggggggtccctgcgtctctcctgtgcagcctccggattcaccttttgggtgtatgatatgcgttgggtccgccaggctccagggaagggtctagagtgggtctcaacgatttctgcgactggtgtgcatacatactacgcagactccgtgaagggccggttcaccatctcccgcgacaattccaagaacacgctgtatctgcaaatgaacagcctgcgtgccgaggacaccgcggtatattactgtgcgaaatatccgcctgctggtcggtttgactactggggtcagggaaccctggtcaccgtctcgagc

SEQ ID NO: 762 - DNA, 357 bp, Artificial Sequence
  Description of Artificial Sequence: Synthetic polynucleotide
gaggtgcagctgttggagtctgggggaggcttggtacagcctggggggtccctgcgtctctcctgtgcagcctccggattcaccttttcgacttatgatatgatttgggtccgccaggctccagggaagggtctagagtgggtctcagctatttctcctaatggtactggtacatactacgcagactccgtgaagggccggttcaccatctcccgcgacaattccaagaacacgctgtatctgcaaatgaacagcctgcgtgccgaggacaccgcggtatattactgtgcgaaacctccgcaggtgaatactgagtttgactaccggggtcagggaaccctggtcaccgtctcgagc

SEQ ID NO: 763 - DNA, 348 bp, Artificial Sequence
  Description of Artificial Sequence: Synthetic polynucleotide
gaggtgcagctgttggagtctgggggaggcttggtacagcctggggggtccctgcgtctctcctgtgcagcctccggattcacctttgagaaggaggatatggggtgggtccgccaggctccagggaagggtctagagtgggtctcacatatttcgccgaatggttatgcgacatactacgcagactccgtgaagggccggttcaccatctcccgcgacaattccaagaacacgctgtatctgcaaatgaacagcctgcgtgccgaggacaccgcggtatattactgtgcgaaaagttggtctagttttgactactggggtcagggaaccctggtcaccgtctcgagc

SEQ ID NO: 764 - DNA, 354 bp, Artificial Sequence
  Description of Artificial Sequence: Synthetic polynucleotide
gaggtgcagctgttggagtctgggggaggcttggtacagcctggggggtccctgcgtctctcctgtgcagcctccggattcacctttagtgctactccgatggagtgggcccgccaggctccagggaagggtctagagtgggtctcaactatttctgagagtggttatagtacatactacgcagactccgtgaagggccggttcaccatctcccgcgacaattccaagaacacgctgtatctgcaaatgaacagcctgcgtgccgaggacaccgcggtatattactgtgcgaaatggaattcgactactggttttgactactggggtcagggaaccctggtcaccgtctcgagc

SEQ ID NO: 765 - DNA, 351 bp, Artificial Sequence
  Description of Artificial Sequence: Synthetic polynucleotide
gaggtgcagctgttggagtctgggggaggcttggtacagcctggggggtccctgcgtctctcctgtgcagcctccggattcacctttaatacggtggatatggagtgggtccgccaggctccagggaagggtctagagtgggtctcaagtattagtccgaatggttgggatacatactacgcagactccgtgaagggccggttcaccatctcccgcgacaattccaagaacacgctgtatctgcaaatgaacagcctgcgtgccgaggacaccgcggtatattactgtgcggaagctccgcatcgggcgtttgactactggggtcagggaaccctggtcaccgtctcgagc

SEQ ID NO: 766 - DNA, 357 bp, Artificial Sequence
  Description of Artificial Sequence: Synthetic polynucleotide
gaggtgcagctgttggagtctggggggggcttggtacagcctggggggtccctgcgtctctcctgtgcagcctccggattcacctttgaggataaggagatgagttgggtccgccaggctccagggaagggtctagagtgggtctcacggattgatgctttgggtgattctacatactacgcagactccgtgaagggccggttcaccatctcccgcgacaattccaagaacacgctgtatctgcaaatgaacagcctgcgtgccgaggacaccgcggtatattactgtgcggaagggatggttcctcgtctgaagtttgactactggggtcagggaaccctggtcaccgtctcgagc

SEQ ID NO: 767 - DNA, 342 bp, Artificial Sequence
  Description of Artificial Sequence: Synthetic polynucleotide
gaggtgcagctgttggagtctgggggaggcttggtacagcctggggggtccctgcgtctctcctgtgcagcctccggattcacctttagtgatcattcgatgatgtgggtccgccaggctccagggaagggtctagagtgggtctcagatattgagccgcatggtgttcatacatactacgcagactccgtgaagggccggttcaccatctcccgcgacaattccaagaacacgctgtatctgcaaatgaacagcctgcgtgccgaggacaccgcggtatattactgtgcgaatcctacttttgactactggggtcagggaaccctggtcaccgtctcgagc

SEQ ID NO: 768 - DNA, 366 bp, Artificial Sequence
  Description of Artificial Sequence: Synthetic polynucleotide
gaggtgcagctgttggagtctgggggaggcttggtacagcctggggggtccctgcgtctctcctgtgcagcctccggattcaccttttcgccgcatactatgcattgggtccgccaggctccagggaagggtctagagtgggtctcaggtattggtccggatggtactactacatactacgcagactccgtgaagggccggttcaccatctcccgcgacaattccaagaacacgctgtatctgcaaatgaacagcctgcgtgccgaggacaccgcggtatattactgtgcgaaacgttcgtatagttgggatcgtgggtggacgtttgactactggggtcagggaaccctggtcaccgtctcgagc

SEQ ID NO: 769 - DNA, 357 bp, Artificial Sequence
  Description of Artificial Sequence: Synthetic polynucleotide
gaggtgcagctgttggagtctgggggaggcttggtacagcctggggggtccctgcgtctctcctgtgcagcctccggattcaccttttatgcttcggatatgaagtgggtccgccaggctccagggaagggtctagagtgggtctcaagtattagtccgaatggttgggatacatactacgcagactccgtgaagggccggttcaccatctcccgcgacaattccaagaacacgctgtatctgcaaatgaacagcctgcgtgccgaggacaccgcggtatattactgtgcgaaagctgattatacttatcattcttttgactactggggtcaggggaccctggtcaccgtctcgagc

SEQ ID NO: 770 - DNA, 351 bp, Artificial Sequence; identical to SEQ ID NO: 754
  Description of Artificial Sequence: Synthetic polynucleotide

SEQ ID NO: 771 - DNA, 354 bp, Artificial Sequence
  Description of Artificial Sequence: Synthetic polynucleotide
gaggtgcagctgttggagtctgggggaggcttggtacagcctggggggtccctgcgtctctcctgtgcagcctccggattcaccttttcgcattatcatatgggttgggcccgccaggctccagggaagggtctagagtgggtctcagttattgggccgaggggtatttctacatactacgcagactccgtgaagggccggttcaccatctcccgcgacaattccaagaacacgctgtatctgcaaatgaacagcctgcgtgccgaggacaccgcggtatattactgtgcgaaatcgccttcgcgtcataggtttgactactggggtcagggaaccctggtcaccgtctcgagc

SEQ ID NO: 772 - DNA, 351 bp, Artificial Sequence; identical to SEQ ID NO: 758
  Description of Artificial Sequence: Synthetic polynucleotide

SEQ ID NO: 773 - DNA, 369 bp, Artificial Sequence
  Description of Artificial Sequence: Synthetic polynucleotide
gaggtgcagctgttggagtctgggggaggcttggtacagcctggggggtccctgcgtctctcctgtgcagcctccggattcacctttggtaattatagtatgaagtgggcccgccaggctccagggaagggtctagagtgggtctcaactattactcctgatggttggtatacatactacgcagactccgtgaagggccggttcaccatctcccgcgacaattccaagaacacgctgtatctgcaaatgaacagcctgcgtgccgaggacaccgcggtatattactgtgcgaaagtgggggatgctgtttgggggtggattggtgggtttgactactggggtcagggaaccctggtcaccgtctcgagc

SEQ ID NO: 774 - DNA, 348 bp, Artificial Sequence
  Description of Artificial Sequence: Synthetic polynucleotide
gaggtgcagctgttggagtctgggggaggcttggtacagcctggggggtccctgcgtctctcctgtgcagcctccggattcacctttggggattatggtatgaagtgggtccgccaggctccagggaagggtctagagtgggtctcagctattacgtctaatggtgattttacatactacgcagactccgtgaagggccggttcaccatctcccgcgacaattccaagaacacgctgtatctgcaaatgaacagcctgcgtgccgaggacaccgcggtatattactgtgcgaaatctttgtataagtttgactactggggtcagggaaccctggtcaccgtctcgagc

SEQ ID NO: 775 - DNA, 369 bp, Artificial Sequence
  Description of Artificial Sequence: Synthetic polynucleotide
gaggtgcagctgttggagtctgggggaggcttggtacagcctggggggtccctgcgtctctcctgtgcaggctccggattcacctttcctacttataagatggggtgggtccgccaggctccagggaagggtctagagtgggtctcatttattgattattggggttggcggacatactacgcagactccgtgaagggccggttcaccatctcccgcgacaattccaagaacacgctgtatctgcaaatgaacagcctgcgtgccgaggacaccgcggtatattactgtgcgaaaagtccgtattcttggactcatgatagtcctcattttgactactggggtcagggaaccctggtcaccgtctcgagc

SEQ ID NO: 776 - DNA, 348 bp, Artificial Sequence
  Description of Artificial Sequence: Synthetic polynucleotide
gaggtgcagctgttggagtctgggggaggcttggtacagcctggggggtccctgcgtctctcctgtgcagcctccggattcacctttaggccttatacgatgtgttgggcccgccaggctccagggaagggtctagagtgggtctcatgtattagtgatgctggttcttttacatactacgcagactccgtgaagggccggttcaccatctcccgcgacaattccaagaacacgctgtatctgcaaatgaacagcctgcgtgccgaggataccgcggtatattactgtgcgaaaaggatgtcttcttttgactactggggtcagggaaccctggtcaccgtctcgagc

SEQ ID NO: 777 - DNA, 366 bp, Artificial Sequence
  Description of Artificial Sequence: Synthetic polynucleotide
gaggtgcagctgttggagtctgggggaggcttggtacagcctggggggtccctgcgtctctcctgtgcagcctccggattcacctttcagaattatcagatggcttgggtccgccaggctccagggaagggtctagagtgggtctcaactattagtgggactggtaagaatacatactacgcagactccgtgaagggccggttcaccatctcccgcgacaattccaagaacacgctgtatctgcaaatgaacagcctgcgtgccgaggacaccgcggtatattactgtgcgaaaactcctcagaattattttagtgtgcgtcggtttgactactggggtcagggaaccctggtcaccgtctcgagc

SEQ ID NO: 778 - DNA, 354 bp, Artificial Sequence
  Description of Artificial Sequence: Synthetic polynucleotide
gaggtgcagctgttggagtctgggggaggcttggtacagcctggggggtccctgcgtctctcctgtgcagcctccggattcacctttggggcgtatactatggggtgggtccgccaggctccagggaagggtctagagtgggtctcaaagatttcgacgtctggtgggcagacatactacgcagactccgtgaagggccggttcaccatctcccgcgacaattccaagaacacgctgtatctgcaaatgaacagcctgcgtgccgaggacaccgcggtatattactgtgcgaaacctttgaattggtgggcgtttgactactggggtcagggaaccctggtcaccgtctcgagc

SEQ ID NO: 779 - DNA, 351 bp, Artificial Sequence
  Description of Artificial Sequence: Synthetic polynucleotide
gaggtgcagctgttggagtctgggggaggcttggtacagcctggggggtccctgcgtctctcctgtgcagcctccggattcacctttaatgcgtatcctatgacttgggtccgccaggctccagggaagggtctagagtgggtctcacggattgatggttatggtcggcatacatactacgcagactccgtgaagggccggttcaccatctcccgcgacaattccaagaacacgctgtatctgcaaatgaacagcctgcgtgccgaggacaccgcggtatattactgtgcgaaagggattattcctaattttgactactggggtcagggaaccctggtcaccgtctcgagc

SEQ ID NO: 780 - DNA, 357 bp, Artificial Sequence
  Description of Artificial Sequence: Synthetic polynucleotide
gaggtgcagctgttggagtctgggggaggcttggtacagcctggggggtccctgcgtctctcctgtgcagcctccggattcacctttggggcggttgatatgacgtgggtccgccaggctccagggaagggtctagagtgggtctcagcgatttcgcctagtggttctgctacatactacgcagactccgtgaagggccggttcaccatctcccgcgacaattccaagaacacgctgtatctgcaaatgaacagcctgcgtgccgaggacaccgcggtatattactgtgcgaaagggcgtgtgccggatcttggttttgactactggggtcagggaaccctggtcaccgtctcgagc

SEQ ID NO: 781 - DNA, 351 bp, Artificial Sequence
  Description of Artificial Sequence: Synthetic polynucleotide
gaggtgcagctgttggagtctgggggaggcttggtacagcctggggggtccctgcgtctctcctgtgcagcctccggattcacctttgatagttatgcgatggggtgggcccgccaggctccagggaagggtctagagtgggtctcagctattggggctaagggtttgtctacatactacgcagactccgtgaagggccggttcaccatctcccgcgacaattccaagaacacgctgtatctgcaaatgaacagcctgcgtgccgaggacaccgcggtatattactgtgcgaaagcggctaggggtaagtttgactactggggtcagggaaccctggtcaccgtctcgagc

SEQ ID NO: 782 - DNA, 348 bp, Artificial Sequence
  Description of Artificial Sequence: Synthetic polynucleotide
gaggtgcagctgttggagtctgggggaggcttggtacagcctggggggtccctgcgtctctcctgtgcagcctccggattcacctttactcggtatcagatgggttgggtccgccaggctccagggaagggtctagagtgggtctcagttattaatgtttggggttcgagtacatactacgcagactccgtgaagggccggttcaccatctcccgcgacaattccaagaacacgctgtatctgcaaatgaacagcctgcgtgccgaggacaccgcggtatattactgtgcgaaaatgtctgggaagtttgcctactggggtcagggaaccctggtcaccgtctcgagc

SEQ ID NO: 783 - DNA, 351 bp, Artificial Sequence
  Description of Artificial Sequence: Synthetic polynucleotide
gaggtgcagctgttggagtctgggggaggcttggtacagcctggggggtccctgcgtctttcctgtgcagcctccggattcacctttgggaattatagtatgatgtgggtccgccaggctccagggaagggtctagagtgggtctcaacgattattcctgctggtacgtctacatactacgcagactccgtgaagggccggttcaccatctcccgcgacaattccaagaacacgctgtatctgcaaatgaacagcctgcgtgccgaggacaccgcggtatattactgtgcgaaaccgtcgattaggttgtttgactactggggtcagggaaccctggtcaccgtctcgagc

SEQ ID NO: 784 - DNA, 348 bp, Artificial Sequence
  Description of Artificial Sequence: Synthetic polynucleotide
gaggtgcagctgttggagtctgggggaggcttggtacagcctggggggtccctgcgtctctcctgtgcagcctccggattcacctttggtgcgtatgatatggggtgggtccgccaggctccagggaagggtctagagtgggtctcatggatttctccgaatggttatgatacatactacgcagactccgtgaagggccggttcaccatctcccgcgacaattccaagaacacgctgtatctgcaaatgaacagcctgcgtgccgaggacaccgcggtatattactgtgcgaaagggggtgtgaagtttgactactggggtcagggaaccctggtcaccgtctcgagc

SEQ ID NO: 785 - DNA, 369 bp, Artificial Sequence
  Description of Artificial Sequence: Synthetic polynucleotide
gaggtgcagctgttggagtctgggggaggcttggtacagcctggggggtccctgcgtctctcctgtgcagcctccggattcacctttgtttggtatgagatggcttgggtccgccaggctccagggaagggtctagagtgggtctcaacgattcaggctgatggtgagcagacatactacgcagactccgtgaagggccggttcaccatctcccgcgacaattccaagaacacgctgtatctgcaaatgaacagcctgcgtgccgaggataccgcggtatattactgtgcgaaagcttcgtatgctcttgtgtatcctcctgaggagtttgactactggggtcagggaaccctggtcaccgtctcgagc

SEQ ID NO: 786 - DNA, 366 bp, Artificial Sequence
  Description of Artificial Sequence: Synthetic polynucleotide
gaggtgcagctgttggagtctgggggaggcttggtacagcctggggggtccctgcgtctctcctgtgcagcctccggattcacctttacgaattataggatgtcttgggtccgccaggctccagggaagggtctagagtgggtctcagctattgatgatctgggtgtgtcgacatactacgcagactccgtgaagggccggttcaccatctcccgcgacaattccaagaacacgctgtatctgcaaatgaacagcctgcgtgccgaggacaccgcggtatattactgtgcgaaatggaggcttaagaatagtcagccgacggattttgactactggggtcagggaaccctggtcaccgtctcgagc

SEQ ID NO: 787 - DNA, 357 bp, Artificial Sequence
  Description of Artificial Sequence: Synthetic polynucleotide
gaggtgcagctgttggagtctgggggaggcttggtacagcctggggggtccctgcgtctctcctgtgcagcctccggattcacctttgatcaggctcatatgtggtgggtccgccaggctccagggaagggtctagagtgggtctcatttattaatccttcgggttattatacatactacgcagactccgtgaagggccggttcaccatctcccgcgacaattccaagaacacgctgtatctgcaaatgaacagcctgcgtgccgaggacaccgcggtatattactgtgcgaaaccttcgcttagtccgtcttcttttgactactggggtcagggaaccctggtcaccgtctcgagc

SEQ ID NO: 788 - DNA, 354 bp, Artificial Sequence
  Description of Artificial Sequence: Synthetic polynucleotide
gaggtgcagctgttggagtctgggggaggcttggtacagcctggggggtccctgcgtctctcctgtgcagcctccggattcacctttgagactggtcagatgggttgggcccgccaggctccagggaagggtctagagtgggtctcaaatattgatgggtctggtacgtatacatactacgcagactccgtgaagggccggttcaccatctcccgcgacaattccaagaacacgctgtatctgcaaatgaacagcctgcgtgccgaggacaccgcggtatattactgtgcgaaaagtacgcagaattatcggtttgactactggggtcagggaaccctggtcaccgtctcgagc

SEQ ID NO: 789 - DNA, 357 bp, Artificial Sequence
  Description of Artificial Sequence: Synthetic polynucleotide
gaggtgcagctgttggagtctgggggaggcttggtacagcctggggggtccctgcgtctctcctgtgcagcctccggattcacctttggtgcttatccgatgtattgggtccgccaggctccagggaagggtctagagtgggtctcatctattcataaggatggtaggattacatactacgcagactccgtgaagggccggttcaccatctcccgcgacaattccaagaacacgctgtatctgcaaatgaacagcctgcgtgccgaggacaccgcggtatattactgtgcgaaacagggtacgccggttgatgggtttgactactggggtcagggaaccctggtcaccgtctcgagc

SEQ ID NO: 790 - DNA, 363 bp, Artificial Sequence
  Description of Artificial Sequence: Synthetic polynucleotide
gaggtgcagctgttggagtctgggggaggcttggtacagcctggggggtccctgcgtctctcctgtgcagcctccggattcacctttcctgatgagggtatgacgtgggtccgccaggctccagggaagggtctagagtgggtctcaacgattgagactggtggtacggtgacatactacgcagactccgtgaagggccggttcaccatctcccgcgacaattccaagaacacgctgtatctgcaaatgaacagcctgcgtgccgaggacaccgcggtatattactgtgcgaaaatggatgggtctggtacatggcagacgtttgactactggggtcagggaaccctggtcaccgtctcgagc

SEQ ID NO: 791 - DNA, 348 bp, Artificial Sequence
  Description of Artificial Sequence: Synthetic polynucleotide
gaggtgcagctgttggagtctgggggaggcttggtacagcctggggggtccctgcgtctctcctgtgcagcctccggattcacctttgatagtctgggtatgggttgggcccgccaggctccagggaagggtctagagtgggtctcatatattcgggctgagggtgcttatacatactacgcagactccgtgaagggccggttcaccatctcccgcgacaattccaagaacacgctgtatctgcaaatgaacagcctgcgtgccgaggataccgcggtatattactgtgcgaaatatcttgcggattctgactactggggtcagggaaccctggtcaccgtctcgagc

SEQ ID NO: 792 - DNA, 360 bp, Artificial Sequence
  Description of Artificial Sequence: Synthetic polynucleotide
gaggtgcagctgttggaatctgggggaggcttggtacagcctggggggtccctgcgtctctcctgtgcagcctccggattcacctttagtgagtcgtatatggagtgggtccgccaggctccagggaagggtctagagtgggtctcaggtattgatcatattggtggtgggacatactacgcagactccgtgaagggccggttcaccatctcccgcgacaattccaagaacacgctgtatctgcaaatgaacagcctgcgtgccgaggacaccgcggtatattactgtgcgaaagatgatggtcgtggtgggtctatgtttgactactggggtcagggaaccctggtcaccgtctcgagc

SEQ ID NO: 793 - DNA, 348 bp, Artificial Sequence
  Description of Artificial Sequence: Synthetic polynucleotide
gaggtgcagctgttggagtctgggggaggcttggtacagcctggggggtccctgcgtctctcctgtgcagcctccggattcaccttttctggtgggtatatgtggtgggtccgccaggctccagggaagggtctagagtgggtctcaagtattggggctagtggtgcgtatacatactacgcagactccgtgaagggccggttcaccatctcccgcgacaattccaagaacacgctgtatctgcaaatgaacagcctgcgtgccgaggacaccgcggtatattactgtgcgaaaacggggggtaggttagactactggggtcagggaaccctggtcaccgtctcgagc

SEQ ID NO: 794 - DNA, 357 bp, Artificial Sequence
  Description of Artificial Sequence: Synthetic polynucleotide
gaggtgcagctgttggagtctgggggaggcttggtacagcctggggggtccctgcgtctctcctgtgcagcctccggattcacctttgatgaggggcatatggggtgggtccgccaggctccagggaaggatctagagtgggtctcatatattgggagtctgggtttgcatacatactacgcagactccgtgaagggccggttcaccatctcccgcgacaattccaagaacacgctgtatctgcaaatgaacagcctgcgtgccgaggacaccgcggtatattactgtgcgaaacgggagtttagtaatggggggtttgactactggggtcagggaaccctggtcaccgtctcgagc

SEQ ID NO: 795 - DNA, 363 bp, Artificial Sequence
  Description of Artificial Sequence: Synthetic polynucleotide
gaggtgcagctgttggagtctgggggaggcttggtacagcctggggggtccctgcgtctctcctgtgcagcctccggattcacctttaagactagtcctatgtattgggtccgccaggctccagggaagggtctagagtgggtctcatcgattgatcggactggtgggcatacatactacgcagactccgtgaagggccggttcaccatctcccgcgacaattccaagaacacgctgtatctgcaaatgaacagcctgcgtgccgaggacaccgcggtatattactgtgcgaaacaggctctgcttactgatgcgaagcgttttgactactggggtcagggaaccctggtcaccgtctcgagc

SEQ ID NO: 796 - DNA, 360 bp, Artificial Sequence
  Description of Artificial Sequence: Synthetic polynucleotide
gaggtgcagctgttggagtctgggggaggcttggtacagcctggggggtccctgcgtctctcctgtgcagcctccggattcacctttgatggtcgggatatggtttgggtccgccaggctccagggaagggtctagagtgggtctcagctattagtccgagtggtctggatacatactacgcagactccgtgaagggccggttcaccatctcccgcgacaattccaagaacacgctgtatctgcaaatgaacagcctgcgtgccgaggacaccgcggtatattactgtgcggaacgtcctcagatgctggttactaattttgactactggggtcagggaaccctggtcaccgtctcgagc

SEQ ID NO: 797 - DNA, 357 bp, Artificial Sequence
  Description of Artificial Sequence: Synthetic polynucleotide
gaggtgcagctgttggagtctgggggaggcttggtacagcctggggggtccctgcgtctctcctgtgcagcctccggattcacctttggtaatgatccgatgagttgggtccgccaggctccagggaagggtctagagtgggtctcagggattggtcgggagggtgattctacatactacgcagactccgtgaagggccggttcaccatctcccgcgacaattccaagaacacgctgtatctgcaaatgaacagcctgcgtgccgaggacaccgcggtatattactgtgcgaaagattctatgcggcatcagccgtttgactactggggtcagggaaccctggtcaccgtctcgagc

SEQ ID NO: 798 - DNA, 357 bp, Artificial Sequence
  Description of Artificial Sequence: Synthetic polynucleotide
gaggtgcagctgttggagtctgggggaggcttggtacagcctggggggtccctgcgtctctcctgtgcagcctccggattcacctttgatgagacttatatgaagtgggtccgccaggctccagggaagggtctagagtgggtctcagcgattggggcgtcgggtgctgatacatactacgcagactccgtgaagggccggttcaccatctcccgcgacaattccaagaacacgctgtatctgcaaatgaacagcctgcgtgccgaggacaccgcggtatattactgtgcgaaatttacgcatctgaatggtcggtttgactactggggtcagggaaccctggtcaccgtctcgagc

SEQ ID NO: 799 - DNA, 357 bp, Artificial Sequence
  Description of Artificial Sequence: Synthetic polynucleotide
gaggtgcagctgttggagtctgggggaggcttggtacagcctggggggtccctgcgtctctcctgtgcagcctccggattcacctttggggggtggcctatggggtgggtccgccaggctccagggaagggtctagagtgggtctcaggtattgatattgatggtgctccgacatactacgcagactccgtgaagggccggttcaccatctcccgcgacaattccaagaacacgctgtatctgcaaatgaacagcctgcgtgccgaggacaccgcggtatattactgtgcgaaagaggaggcgggttcttggtcttttgactactggggtcagggaaccctggtcaccgtctcgagc

SEQ ID NO: 800 - DNA, 348 bp, Artificial Sequence
  Description of Artificial Sequence: Synthetic polynucleotide
gaggtgcagctgttggagtctgggggaggcttggtacagcctggggggtccctgcgtctctcctgtgcagcctccggattcacctttagtgatcaggcgatgtggtgggcccgccaggctccagggaagggtctagagtgggtctcatttattcagggtgatggtggttttacatactacgcagactccgtgaagggccggttcaccatctcccgcgacaattccaagaacacgctgtatctgcaaatgaacagcctgcgtgccgaggacaccgcggtatattactgtgcgaaacctagtaagccgtttgactactggggtcagggaaccctggtcaccgtctcgagc

SEQ ID NO: 801 - DNA, 354 bp, Artificial Sequence
  Description of Artificial Sequence: Synthetic polynucleotide
gaggtgcagctgttggagtctgggggaggcttggtacagcctggggggtccctgcgtctctcctgtgcagcctccggattcacctttgagactggtcagatgggttgggcccgccaggctccagggaagggtctagagtgggtctcaaatattgatgggtctggtacgtatacatactacgcagactccgtgaagggccggttcaccatctcccgcgacaattccaagaacacgctgtatctgcaaatgaacagcctgcgtgccgaggacaccgcggtatattactgtgcgaaagcggtgcggaattttgcttttgactactggggtcagggaaccctggtcaccgtctcgagc

SEQ ID NO: 802 - DNA, 372 bp, Artificial Sequence
  Description of Artificial Sequence: Synthetic polynucleotide
gaggtgcagctgttggagtctgggggaggcttggtacagcctggggggtccctgcgtctctcctgtgcagcctccggattcacctttagtgggcatgatatgtcttgggtccgccaggctccagggaagggtctagagtgggtctcagctattagtcctcatggtacgcatacatactacgcagactccgtgaagggccggttcaccatctcccgcgacaattccaagaacacgctgtatctgcaaatgaacagcctgcgtgccgaggacaccgcggtatattactgtgcgaaagggattaggggttggattggtcatgatacgcagccttttgactactggggtcagggaaccctggtcaccgtctcgagc

SEQ ID NO: 803 - DNA, 357 bp, Artificial Sequence
  Description of Artificial Sequence: Synthetic polynucleotide
gaggtgcagctgttggagtctgggggaggcttggtacagcctggggggtccctgcgtctctcctgtgcagcctccggattcacctttgagagtaaggatatgctttgggtccgccaggctccagggaagggtctagagtgggtctcatctatttcgtcggatggtactcatacatactacgcagactccgtgaagggccggttcaccatctcccgcgacaattccaagaacacgctgtatctgcaaatgaacagcctgcgtgccgaggacaccgcggtatattactgtgcgcaagagctgggtgggtcttggcagtttgactactggggtcagggaaccctggtcaccgtctcgagc

SEQ ID NO: 804 - DNA, 366 bp, Artificial Sequence
  Description of Artificial Sequence: Synthetic polynucleotide
gaggtgcagctgttggagtctgggggaggcttggtacagcctggggggtccctgcgtctctcctgtgcagcctccggattcacctttgcggatcgtgatatggtttgggtccgccaggctccagggaagggtctagagtgggtctcaggtattggggcgtcgggtacgtctacatactacgcagactccgtgaagggccggttcaccatctcccgcgacaattccaagaacacgctgtatctgcaaatgaacagcctgcgtgccgaggacgccgcggtatattactgtgcgaaaggtgggacgggtcctactgatttgtgggattttgactactggggtcagggaaccctggtcaccgtctcgagc

SEQ ID NO: 805 - DNA, 357 bp, Artificial Sequence
  Description of Artificial Sequence: Synthetic polynucleotide
gaggtgcagctgttggagtctgggggaggcttggtacagcctggggggtccctgcgtctctcctgtgcagcctccggattcacctttgatgatgagaagatgctttgggtccgccaggctccagggaagggtctagagtgggtctcaagtattagtgtgagtggtctgcatacatactacgcagactccgtgaagggccggttcaccatctcccgcgacaattccaagaacacgctgtatctgcaaatgaacagcctgcgtgccgaggacaccgcggtatattactgtgcgaaagaggaggcgggttcttggtcttttgactactggggtcagggaaccctggtcaccgtctcgagc

SEQ ID NO: 806 - DNA, 357 bp, Artificial Sequence
  Description of Artificial Sequence: Synthetic polynucleotide
gaggtgcagctgttggagtccgggggaggcttggtacagcctggggggtccctgcgtctctcctgtgcagcctccggattcacctttgggcaggagaggatgatttgggtccgccaggctcctgggaagggtctagagtgggtctcagatatttcggcttcgggtgggactacatactacgcagactccgtgaagggccggttcaccatctcccgcgacaattccaagaacacgctgtatctgcaaatgaacagcctgcgtgccgaggacaccgcggtatattactgtgcgaaagaggaggcgggttcttggtcttttgactactggggtcagggaaccctggtcaccgtctcgagc

SEQ ID NO: 807 - DNA, 348 bp, Artificial Sequence
  Description of Artificial Sequence: Synthetic polynucleotide
gaggtgcagctgttggagtctgggggaggcttggtacagcctggggggtctctgcgtctctcctgtgcagcctccggattcacctttgagtggtatgagatgcagtgggtccgccaggctccagggaagggtctagagtgggtctcagcgatttctggtgatggttatcgtacatactacgcagactccgtgaaaggccggttcaccatctcccgcgacaattccatgaacacgctgtatctgcaaatgaacagcctgcgtgccgaggacaccgcggtatattactgtgcgaaagagcttgggtattttgactacaggggtcggggaaccctggtcaccgtctcgagc

SEQ ID NO: 808 - DNA, 348 bp, Artificial Sequence
  Description of Artificial Sequence: Synthetic polynucleotide
gaggtgcagctgttggagtctgggggaggcttggtacagcctggggggtccctgcgtctctcctgtgcagcctccggattcacctttgagtggtatgagatgcagtgggtccgccgggctccagggaagggactagagtgggtctcagcgatttctggtgatggttatcgtacatactacgcagactccgtgaaaggccggttcaccatctcccgcgacaattccaagaacacgctgtatctgcaaatgaacagcctgcgtgccgaggacaccgcggtatattactgtgcgaaagagcttgggtattttgactactggggtcggggaaccctggtcaccgtctcgagc

SEQ ID NO: 809 - DNA, 348 bp, Artificial Sequence
  Description of Artificial Sequence: Synthetic polynucleotide
gaggtgcagctgttggagtctgggggaggcttggtacagcctggggggtccctgcgtctctcctgtgcagcctccggattcacctttgagtggtatgagatgcagtgggtccgccgggctccagggaagggtctagagtgggtctcagcgatttctggtgatggttatcgtacatactacgcagactccgtgaaaggccggttcaccatctcccgcgacaattccaagaacacgctgtatctgcaaatgaacagcctgcgtgccgaggacaccgcggtatattactgtgcgaaagagcttgggtattttgactaccgggttcagggaaccctggtcaccgtctcgagc

SEQ ID NO: 810 - DNA, 348 bp, Artificial Sequence
  Description of Artificial Sequence: Synthetic polynucleotide
gaggtgcagctgttggagtctgggggaggcttggtacagcctggggggtccctgcgtctctcctgtgcagcctccggattcacctttgagtggtatgagatgcagtgggtccgcaaggctccagggaagggtctagagtgggtctcagcgatttctggtgatggttatcgtacatactacgcagactccgtgaaaggccggttcaccatctcccgcgacaattccaagaacacgctgtatctgcaaatgaacagcctgcgtgccgaggacaccgcggtatattactgtgcgaaagagcttgggtattttgactactggggtcggggaaccctggtcaccgtctcgagc

SEQ ID NO: 811 - DNA, 348 bp, Artificial Sequence
  Description of Artificial Sequence: Synthetic polynucleotide
gaggtgcagctgttggagtctgggggaggcttggtacagcctggggggtccctgcgtctctcctgtgcagcctccggattcacctttgagtggtatgagatgcagtgggtccgccaggctccagggaagggtctagagtggatctcagcgatttctggtgatggttatcgtacatactacgcagactccgtgaaaggccggttcaccatctcccgcgacaattccaagaacacgctgtatctgcaaatgaacagcctgcgtgccgaggacaccgcggtatattactgtgcgaaagagcttgggtattttgactacagggttcagggaaccctggtcaccgtctcgagc

SEQ ID NO: 812 - DNA, 348 bp, Artificial Sequence
  Description of Artificial Sequence: Synthetic polynucleotide
gaggtgcagctgttggagtctgggggaggcttggtacagcctggggggtccctgcgtctctcctgtgcagcctccggattcacctttgagtggtatgagatgcagtgggtccgccgggctccagggaagggtctagagtgggtctcagcgatttctggtgatggttatcgtacatactacgcagactccgtgaaaggccggttcaccatctcccgcgacaattccgagaacacgctgtatctgcaaatgaacagcctgcgtgccgaggacaccgcggtatattactgtgcgaaagagcttgggtattttgactactggggtcggggaaccctggtcaccgtctcgagc

SEQ ID NO: 813 - DNA, 348 bp, Artificial Sequence
  Description of Artificial Sequence: Synthetic polynucleotide
gaggtgcagctgttggagactgggggaggcttggtacagcctggggggtccctgcgtctctcctgtgcagcctccggattcacctttgagtggtatgagatgcagtgggtccgccgggctccagggaagggtctagagtgggtctcagcgatttctggtgatggttatcgtacatactacgcagactccgtgaaaggccggttcaccatctcccgcgacaattccaagaacacgctgtatctgcaaatggacagcctgcgtgccgaggacaccgcggtatattactgtgcgaaagagcttgggtattttgactactggggtcggggaaccctggtcaccgtcacgagc

SEQ ID NO: 814 - DNA, 348 bp, Artificial Sequence
  Description of Artificial Sequence: Synthetic polynucleotide
gaggtgcagctgttggagtctgggggaggcttggtacagcctggggggtccctgcgtctctcctgtgcagcctccggattcacctttgagtggtatgagatgcagtgggtccgccaggctccagggaagggtctagagtgggtctcagcgatttctggtgatggttatcgtacatactacgcagactccgtgaaaggccggttcaccatctcacgcgacaattccaagaacacgctgtatctgcaaatgaacagcctgcgtgccgaggacaccgcggtatattactgtgcgaaagagcttgggtattttcactactggggtcggggaaccctggtcaccgtctcgagc

SEQ ID NO: 815 - DNA, 348 bp, Artificial Sequence
  Description of Artificial Sequence: Synthetic polynucleotide
gaggtgcagctgttggagtctgggggaggcttggtacagcctggggggtccctgcgtctctcctgtgtagcctccggattcacctttgagtggtatgagatgcagtgggtccgccaggctccagggaatggtctagagtggatctcagcgatttctggtgatggttatcgtacatactacgcagactccgtgaaaggccggttcaccatctcccgcgacaattccaagaacacgctgtatctgcaaatgaacagcctgcgtgccgaggacaccgcggtatattactgtgcgaaagagcttgggtattttgactactggggtcggggaaccctggtcaccgtctcgagc

SEQ ID NO: 816 - DNA, 348 bp, Artificial Sequence
  Description of Artificial Sequence: Synthetic polynucleotide
gaggtgcagctgttggagtctgggggaggcttggtacagcctggggggtccctgcgtctctcctgtgcagcctctggattcacctttgagtggtatgagatgcagtgggtccgccgggctccagggaagggtctagagtgggtctcagcgatatctggtgatggttatcgtacatactacgcagactccgtgaaaggccggttcaccatctcccgcgacaattccaagaacacgctgtatctgctaatgaacagcctgcgtgccgaggacaccgcggtatattactgtgcgaaagagcttgggtatttcgactactggggtcggggaaccctcgtcaccgtctcgagc

SEQ ID NO: 817 - DNA, 348 bp, Artificial Sequence
  Description of Artificial Sequence: Synthetic polynucleotide
gaggtgcagctgttggagtctgggggaggcttggtacagcctggggggtccctgcgtctctcctgtgcagcctccggattcacctttgagtggtatgagatgcagtgggtccgcaaggctccagggaagggtctagagtgggtctcagcgatttctggtgatggttatcgtacatactacgcagactccgtgaaaggccggttcaccatctcccgcgacaattccaagaacacgctgtatctgcaaatgaacagcctgcgtgccgaggacaccgcggtatattactgtgcgaaagagcttgggtattttgactacaggggtcggggaaccctggtcaccgtctcgagc

SEQ ID NO: 818 - DNA, 348 bp, Artificial Sequence
  Description of Artificial Sequence: Synthetic polynucleotide
gaggtgcagctgttggagtctgggggaggcttggtacagcctggggggtccatgcgtctctcctgtgcagcctccggattcacctttgagtggtatgagatgcagtgggtccgccgggctccagggaagggtctagagtgggtctcagcgatttctggtgatggttatcgtacatactacgcagactccgtgaaaggccggttcaccatctcccgcgacaattccaagaacacgctgtatctgcaaatgaacagcctgcgtgccgaggacaccgcggtatattactgtgcgaaagagcttgggtattttgactacaggggtcggggaaccctggtcaccgtctcgagc

SEQ ID NO: 819 - DNA, 348 bp, Artificial Sequence
  Description of Artificial Sequence: Synthetic polynucleotide
gaggtgcagctgttggagtctgggggaggcttggtacagcctggggggtccctgcgtctctcctgtgcagcctccggattcacctttgagtggtatgagatgcagtgggtccgccgggctccagggaagggattagagtgggtctcaatgatttccggggatggttatcgtacatactacgcagactccgtgaaaggccggttcaccatctcccgcgacaattccaagaacacgctgtatctgcaaatgaacagcctgcgtgccgaggacaccgcggtatattactgtgcgaaagagcttgggtattttgactactggggtcggggaaccctggtcaccgtctcgagc

SEQ ID NO: 820 - DNA, 348 bp, Artificial Sequence
  Description of Artificial Sequence: Synthetic polynucleotide
gaggtgcagctgttggagtctgggggaggcttggtacagcctggggggtccctgcgtctctcctgtgcagcctccggattcacctttgagtggtatgagatgcagtgggtccgccgggctccagggaagggactagagtgggtctcagcgatttctggtgacggttggcgcacatactacgcagactccgtgaaaggccggttcaccatctcccgcgacaattccaagaacacgctgtatctgcaaatgaacagcctgcgtgccgaggacaccgcggtatattactgtgcgaaagagcttgggtattttgactactggggtcggggaaccctggtcaccgtctcgagc

SEQ ID NO: 821 - DNA, 348 bp, Artificial Sequence
  Description of Artificial Sequence: Synthetic polynucleotide
gaggtgcagctgttggagtctgggggaggcttggtacagcctggggggtccctgcgtctctcctgtgcagcctccggattcacctttgggtggtatgagatgcagtgggtccgccgggctccagggaagggactagagtgggtctcagcgatttctggtgatggttatcgtacatactacgcagactccgtgaaaggccggttcaccatctcccgcgacaattccaagaacacgctgtatctgcaaatgaacagcctgcgtgccgaggacaccgcggtatattactgtgcgaaagagctgctctactttgactactggggtcggggaaccctggtcaccgtctcgagc

SEQ ID NO: 822 - DNA, 348 bp, Artificial Sequence
  Description of Artificial Sequence: Synthetic polynucleotide
gaggtgcagctgttggagtctgggggaggcttggtacagcctggggggtccctgcgtctctcctgtgcagcctccggattcacctttgagtggtatgagatgcagtgggtccgccgggctccagggaagggactagagtgggtctcagcgatttctggtgatggttatcgtacatactacgcagactccgtgaaaggccggttcaccatctcccgcgacaattccaagaacacgctgtatctgcaaatgaacagcctgcgtgccgaggacaccgcggtatattactgtgcgaaagagctggggttctttgactactggggtcggggaaccctggtcaccgtctcgagc

SEQ ID NO: 823 - DNA, 348 bp, Artificial Sequence
  Description of Artificial Sequence: Synthetic polynucleotide
gaggtgcagctgttggagtctgggggaggcttggtacagcctggggggtccctgcgtctctcctgtgcagcctccggattcacctttgagtggtatgagatgcagtgggtccgccgggctccagggaagggactagagtgggtctcagcgatttctggtgatggttatcgtacatactacgcagactccgtgaaaggccggttcaccatctcccgcgacaattccaagaacacgctgtatctgcaaatgaacagcctgcgtgccgaggacaccgcggtatattactgtgcgaaagagttggagtattttgactactggggtcggggaaccctggtcaccgtctcgagc

SEQ ID NO: 824 - DNA, 348 bp, Artificial Sequence
  Description of Artificial Sequence: Synthetic polynucleotide
gaggtgcagctgttggagtctgggggaggcttggtacagcctggggggtccctgcgtctctcctgtgcagcctccggattcacctttgagtggtatgagatgcagtgggtccgccgggctccagggaagggactagagtgggtctcagcgatttctggtgatggttatcgtacatactacgcagactccgtgaaaggccggttcaccatctcccgcgacaattccaagaacacgctgtatctgcaaatgaacagcctgcgtgccgaggataccgcggtatattactgtgcgaaagggttggagtattttgactactggggtcggggaaccctggtcaccgtctcgagc

SEQ ID NO: 825 - DNA, 348 bp, Artificial Sequence
  Description of Artificial Sequence: Synthetic polynucleotide
gaggtgcagctgttggagtctgggggaggcttggtacagcctggggggtccctgcgtctctcctgtgcagcctccggattcacctttgagtggtatgagatgcagtgggtccgccgggctccagggaagggactagagtgggtctcagcgatttctggtgatggttatcgtacatactacgcagactccgtgaaaggccggttcaccatctcccgcgacaattccaagaacacgctgtatctgcaaatgaacagcctgcgtgccgaggacaccgcggtatattactgtgcgaaagagctggccttctttgactactggggtcggggaaccctggtcaccgtctcgagc

SEQ ID NO: 826 - DNA, 348 bp, Artificial Sequence
  Description of Artificial Sequence: Synthetic polynucleotide
gaggtgcagctgttggagtctgggggaggcttggtacagcctggggggtccctgcgtctctcctgtgcagcctccggattcacctttgagtggtatgagatgcagtgggtccgccgggctccagggaagggactagagtgggtctcagcgatttctggtgatggttatcgtacatactacgcagactccgtgaaaggccggttcaccatctcccgcgacaattccaagaacacgctgtatctgcaaatgaacagcctgcgtgccgaggacaccgcggtatattactgtgcgaaagagctcttgtactttgactactggggtcggggaaccctggtcaccgtctcgagc

SEQ ID NO: 827 - DNA, 348 bp, Artificial Sequence
  Description of Artificial Sequence: Synthetic polynucleotide
gaggtgcagctgttggagtctgggggaggcttggtacagcctggggggtccctgcgtctctcctgtgcagcctccggattcacctttgagtggtatgagatgcagtgggtccgccgggctccagggaagggactagagtgggtctcagcgatttctggtgatggttatcgtacatactacgcagactccgtgaaaggccggttcaccatctcccgcgacaattccaagaacacgctgtatctgcaaatgaacagcctgcgtgccgaggacaccgcggtatattactgtgcgaaagagttggagttctttgactactggggtcggggaaccctggtcaccgtctcgagc

SEQ ID NO: 828 - DNA, 348 bp, Artificial Sequence
  Description of Artificial Sequence: Synthetic polynucleotide
gaggtgcagctgttggagtctgggggaggcttggtacagcctggggggtccctgcgtctctcctgtgcagcctccggattcacctttgagtggtatgagatgcagtgggtccgccgggctccagggaagggactagagtgggtctcagcgatttctggtgatggttatcgtacatactacgcagactccgtgaaaggccggttcaccatctcccgcgacaattccaagaacacgctgtatctgcaaatgaacagcctgcgtgccgaggacaccgcggtatattactgtgcgaaagagctgcagttctttgactactggggtcggggaaccctggtcaccgtctcgagc

SEQ ID NO: 829 - DNA, 348 bp, Artificial Sequence
  Description of Artificial Sequence: Synthetic polynucleotide
gaggtgcagctgttggagtctgggggaggcttggtacagcctggggggtccctgcgtctctcctgtgcagcctccggattcacctttgagtggtatgagatgcagtgggtccgccgggctccagggaagggactagagtgggtctcagcgatttctggtgatggttatcgtacatactacgcagactccgtgaaaggccggttcaccatctcccgcgacaattccaagaacacgctgtatctgcaaatgaacagcctgcgtgccgaggataccgcggtatattactgtgcgaaagagctgctcttctttgactactggggtcggggaaccctggtcaccgtctcgagc

SEQ ID NO: 830 - DNA, 348 bp, Artificial Sequence
  Description of Artificial Sequence: Synthetic polynucleotide
gaggtgcagctgttggagtctgggggaggcttggtacggcctggggggtccctgcgtctctcctgtgcagcctccggattcacctttgagtggtatgagatgcagtgggtccgccgggctccagggaagggactagagtgggtctcagcgatttctggtgatggttatcgtacatactacgcagactccgtgaaaggccggttcaccatctcccgcgacaattccaagaacacgctgtatctgcaaatgaacagcctgcgtgccgaggataccgcggtatattactgtgcgaaagagttggagttctttgactactggggtcggggaaccctggtcaccgtctcgagc

SEQ ID NO: 831 - DNA, 348 bp, Artificial Sequence
  Description of Artificial Sequence: Synthetic polynucleotide
gaggtgcagctgttggagtctgggggaggcttggtacagcctggggggtccctgcgtctctcctgtgcagcctccggattcacctttgagtggtatgagatgcagtgggtccgccgggctccagggaagggactagagtgggtctcagcgatttctggtgatggttatcgtacatactacgcagactccgtgaaaggccggttcaccatctcccgcgacaattccaagaacacgctgtatctgcaaatgaacagcctgcgtgccgaggacaccgcggtatattactgtgcgaaagagttgctcttctttgactaccggggtcggggaaccctggtcaccgtctcgagc

SEQ ID NO: 832 - DNA, 348 bp, Artificial Sequence
  Description of Artificial Sequence: Synthetic polynucleotide
gaggtgcagctgttggagtctgggggaggcttggtacagcctggggggtccctgcgtctctcctgtgcagcctccggattcatctttgagtggtatgagatgcagtgggtccgccgggctccagggaagggactagagtgggtctcagcgatttctggtgatggttatcgtacatactacgcagactccgtgaaaggccggttcaccatctcccgcgacaattccaagaacacgctgtatctgcaaatgaacagcctgcgtgccgaggataccgcggtatattactgtgcgaaaaacttggagtattttgactactggggtcggggaaccctggtcaccgtctcgagc

SEQ ID NO: 833 - DNA, 348 bp, Artificial Sequence
  Description of Artificial Sequence: Synthetic polynucleotide
gaggtgcggctgttggagtctgggggaggcttggtacagcctggggggtccctgcgtctctcctgtgcagcctccggattcacctttgagtggtatgagatgcagtgggtccgccgggctccagggaagggactagagtgggtctcagcgatttctggtgatggttatcgtacatactacgcagactccgtgaaaggccggttcaccatctcccgcgacaattccaagaacacgctgtatctgcaaatgaacagcctgcgtgccgaggacaccgcggtatattactgtgcgaaagagttgcagttctttgactactggggtcggggaaccctggtcaccgtctcgagc

SEQ ID NO: 834 - DNA, 348 bp, Artificial Sequence
  Description of Artificial Sequence: Synthetic polynucleotide
gaggtgcagctgttggggtctgggggaggcttggtacagcctggggggtccctgcgtctctcctgtgcagcctccggattcacctttgaggaggaggagatgatttgggtccgccaggctccagggaagggtctagagtgggtctcagctattagtggtagtggtggtagcacatactacgcagactccgtgaagggccggttcaccatctcccgcgacaattccaagaacacgctgtatctgcaaatgaacagcctgcgtgccgaggataccgcggtatattactgttcgaaagagccgtttcgttttgactactggggtcagggaaccctggtcaccgtctcgagc

SEQ ID NO: 835 - DNA, 348 bp, Artificial Sequence
  Description of Artificial Sequence: Synthetic polynucleotide
gaggtgcagctgttggcgtctgggggaggcttggtacagcctggggggtccctgcgtctctcctgcgcagcctccggattcacctttgaggaggaggagatgatttgggtccgtcaggctccagggaagggtctagagtgggtctcagctattagtggtagtggtggtagcacatactacgcagactccgtgaagggccggttcaccatctcccgcgacaattccaagaacacgctgtatctgcaaatgaacagcctgcgtgccgaggataccgcggtatattactgtgggaaagagccgtttcgttatgactactggggtcagggaaccctggtcaccgtctcgagc

SEQ ID NO: 836 - DNA, 348 bp, Artificial Sequence
  Description of Artificial Sequence: Synthetic polynucleotide
gaggtgcagctgttggcgtctgggggaggcttggtacagcctggggggtccctgcgtctctcctgtgcagcctccggattcacctttgaggaggaggagatgatttgggtccgccaggctccagggaagggtctagagtggatctcagctattagtggaagtggtggtagcacatactacgcagactccgtgaagggccggtttaccatctcccgcgacaattccaagaacacgctgtatctgcaaatgaacagcctgcgtgccgaggataccgcggtatattactgtgggaaagagccgtttcgttttgactactggggtcagggaaccctggtcaccgtctcgagc

SEQ ID NO: 837 - DNA, 348 bp, Artificial Sequence
  Description of Artificial Sequence: Synthetic polynucleotide
gaggtgcagctgttggatcctgggggaggcttggtacagcctggggggtccctgcgtctctcctgtgcagcctccggattcacctttgggaaggaggagatgatttgggtccgccaggctccagggaagggtctagagtgggtctcatctattagtggtagtggtggtagcacatactacgcagactccgtgaagggccggttcaccatctcccgcgacaattccaggaacacgctgtatctgcaaatgaacagcctgcgtgccgaggataccgcggtatattactgtgggaaagagccgtttcgttttgactactggggtcagggaaccctggtcaccgtctcgagc

SEQ ID NO: 838 - DNA, 348 bp, Artificial Sequence
  Description of Artificial Sequence: Synthetic polynucleotide
gaggtgcagctgttggggtctgggggaggcttggtacagcctggggggtccctgcgtctctcctgtgcagcctccggattcacctttgaggaggaggagatgatttgggtccgccaggctccagggaagggtctagagtgggtctcagctattagtggtagtggtggtagcacatactacgcagactccgtgaagggccggttcaccatctcccgcgacaattccaagaacacgctgtatctgcaaatgaacagcctgcgtgccgaggataccgcggtatattactgtgggaaagagccgtttcgttttgactactggggtcagggaaccctggtcaccgtctcgagc

SEQ ID NO: 839 - DNA, 348 bp, Artificial Sequence
  Description of Artificial Sequence: Synthetic polynucleotide
gaggtgcagctgttggagcctgggggaggcttggtacagcctgggggctccctgcgtctctcctgtgcagcctccggattcacctttgaggaggaggagatgatttgggtccgccaggctccagggaagggtctagagtgggtctcagctattagtggtagtggtggtagcacatactacgcagactccgtgaagggccggttcaccatctcccgcgacaattccaagaacacgctgtatctgctaatgaacagcctgcgtgccgaggataccgcggtatattactgttcgaaagagccgtttcgttttgactactggggtcagggagccctggtcaccgtctcgagc

SEQ ID NO: 840 - DNA, 348 bp, Artificial Sequence
  Description of Artificial Sequence: Synthetic polynucleotide
gaggtgcagctgttggatcctgggggaggcttggtacagcctggggggtccctgcgtctctcctgtgcagcctccggattcacctttgggaaggaggagatgatttgggtccgccaggctccagggaagggtctagagtgggtctcatctattagtggtagtggtggtagcacatactacgcagactccgttaagggccggttcaccatctcccgcgacaattccaagaacacgctgtatctgcaaatgaacagcctgcgtgccgaggataccgcggtatattactgtgcgaaagagccgttacgttttgactactggggtcagggaaccctggtcaccgtctcgagc

SEQ ID NO: 841 - DNA, 348 bp, Artificial Sequence
  Description of Artificial Sequence: Synthetic polynucleotide
gaggtgcagctgttggagtctgggggaggcttggtacagcctggggggtccctgcgtctctcctgtgcagcctccggattcacctttgaggaggaggagatgatctgggtccgccaggctcctgggaagggtctagagtggatctcagctattagtggtagtggtggtagcacatactacgcagactccgtgaagggccggttcaccatccaccgcgacaattctaagaacactctgtatctgcaaatgaacagcctgcgtgccgaggataccgcggtatattactgttcgaaagagccgtttcgttttgactacaggggtctgggaaccttggtcaccgtctcgagc

SEQ ID NO: 842 - DNA, 348 bp, Artificial Sequence
  Description of Artificial Sequence: Synthetic polynucleotide
gaggtgcagctgttggatcctgggggaggcttggtacagcctggggggtccctgcgtctctcctgtgcagcctccggattcacctttgggaaggaggagatgatttgggtccgccaggctccagggaagggtctagagtgggtctcatctattagtggtagtggtggtagcacatactacgcagactccgtgaagggccggttcaccatctcccgcgacaattccaggaacacgctgtatctgcaaatgaacagcctgcgtgccgaggataccgcggtatattactgtgcgaaagagccgttacgttttgactactggggtcaggggaccctggtcaccgtctcgagc

SEQ ID NO: 843 - DNA, 348 bp, Artificial Sequence
  Description of Artificial Sequence: Synthetic polynucleotide
gaggtgcagctgttggattctgggggaggctttgtacagcctggggggtccctgcgtctctcctgtgcagcctccggattcacctttgaggaggaggagatgatttgggtccgccaggctccagggaagggtctagagtggatctcagctattagtggtagtggtggtagcacatactacgcagactccgtgaagggccggttcaccatctcccgcgacaattccaagaacacgctgtatctgcaaatgaacagcctgcgtgccgaggataccgcggtgtattactgtgcgaaagagccgtttcgttttgactactggggtcagggaaccctggtcaccgtctcgagc

SEQ ID NO: 844 - DNA, 348 bp, Artificial Sequence
  Description of Artificial Sequence: Synthetic polynucleotide
gaggtgcagctgttggatcctgggggaggcttggtacagcctggggggtccctgcgtctctcctgtgcagcctccggattcacctttgaggaggaggagatgatttgggtccgccaggctccagggaagggtctagagtggatctcagctattagtggtagtggtggtagcacatactacgcagactccgtgaagggccggttcaccatctcccgcgacaattccaataacacgctgtatctgcaaatgaacagcctgcgtgccgaggataccgcggtatattactgtgggagagagccgtttcgttttgactactggggtcagggaaccctggtcaccgtctcgagc

SEQ ID NO: 845 - DNA, 348 bp, Artificial Sequence
  Description of Artificial Sequence: Synthetic polynucleotide
gaggtgcggctgttggagtctggggaaggcttggtacagcctggggggtccctgcgtctctcctgtgcagcctccggattcacctttgaggaggaggagatgatttgggtccgccaggctccagggaagggtctagagtgggtctcagctattagtggtagtggtggtagcacatactacgcagactccgtgaagggccggttcaccatctcacgcgacaattccaagaacacgctgtatctgcaaatgaacagcctgcgtgccgaggataccgcggtatattactgtgggaaagagccgtttcgttttgactactggggtcagggaaccctggtcaccgtctcgagc

SEQ ID NO: 846 - DNA, 348 bp, Artificial Sequence
  Description of Artificial Sequence: Synthetic polynucleotide
gaggtgcagcagttggagtctgggggaggcctggtacagcctggggggtccctgcgtctctcctgtgcagcctccggattcacctttgaggaggaggagatgatttgggtccgccaggctccagggaagggtctagagtgggtctcagctattagtggtagtggtggtagcacatactacgcagactccgtgaagggccggttcaccatctcccgcgacaattccaagaacacgctgtatctgcaaatgaacagcctgcgtgccgaggataccgcggtatattactgtgggaaagagccgtttcgttttgactactggggtcagggaaccctggtcaccgtctcgagc

SEQ ID NO: 847 - DNA, 348 bp, Artificial Sequence
  Description of Artificial Sequence: Synthetic polynucleotide
gaggtgcagctgttggcgtctgggggaggcttggtacagcctggggggtccctgcgtctctcctgcgcagcctccggattcacctttgaggaggaggagatgatttgggtccgtcaggctccagggaagggtctagagtgggtctcagctattagtggtagtggtggtagcacatactacgcagactccgtgaagggccggttcaccatctcccgcgacaattccaagaacacgctgtatctgcaaatgaacagcctgcgtgccgaggataccgcggtatattactgtgggaaagagccgttctactacgactactggggtcagggaaccctggtcaccgtctcgagc

SEQ ID NO: 848 - DNA, 348 bp, Artificial Sequence
  Description of Artificial Sequence: Synthetic polynucleotide
gaggtgcagctgttggcgtctgggggaggcttggtacagcctggggggtccctgcgtctctcctgcgcagcctccggattcacctttgaggaggaggagatgatttgggtccgtcaggctccagggaagggtctagagtgggtctcagctattagtggtagtggtggtagcacatactacgcagactccgtgaagggccggttcaccatctcccgcgacaattccaagaacacgctgtatctgcaaatgaacagcctgcgtgccgaggataccgcggtatattactgtgggaaagagccgttctacttcgactactggggtcagggaaccctggtcaccgtctcgagc

SEQ ID NO: 849 - DNA, 348 bp, Artificial Sequence
  Description of Artificial Sequence: Synthetic polynucleotide
gaggtgcagctgttggcgtctgggggaggcttggtacagcctggggggtccctgcgtctctcctgcgcagcctccggattcacctttgaggagaaggagatgatttgggtccgtcaggctccagggaagggtctagagtgggtctcagctattagtggtagtggtggtagcacatactacgcagactccgtgaagggccggttcaccatctcccgcgacaattccaagaacacgctgtatctgcaaatgaacagcctgcgtgccgaggataccgcggtatattactgtgggaaagagccgttcttctacgactactggggtcagggaaccctggtcaccgtctcgagc

SEQ ID NO: 850 - DNA, 348 bp, Artificial Sequence
  Description of Artificial Sequence: Synthetic polynucleotide
gaggtgcagctgttggcgtctgggggaggcttggtacagcctggggggtccctgcgtctctcctgcgcagcctccggattcacctttccccaggaggagatgatttgggtccgtcaggctccagggaagggtctagagtgggtctcagctattagtggtagtggtggtagcacatactacgcagactccgtgaagggccggttcaccatctcccgcgacaattccaagaacacgctgtatctgcaaatgaacagcctgcgtgccgaggataccgcggtatattactgtgggaaagagccgtttcgttatgactactggggtcagggaaccctggtcaccgtctcgagc

SEQ ID NO: 851 - DNA, 348 bp, Artificial Sequence
  Description of Artificial Sequence: Synthetic polynucleotide
gaggtgcagctgttggcgtctgggggaggcttggtacagcctggggggtccctgcgtctctcctgcgcagcctccggattcacctttttcgccgccgagatgatttgggtccgccaggctccagggaagggtctagagtgggtctcagctattagtggtagtggtggtagcacatactacgcagactccgtgaagggccggttcaccatctcccgcgacaattccaagaacacgctgtatctgcaaatgaacagcctgcgtgccgaggataccgcggtatattactgtgggaaagagccgtttcgttatgactactggggtcagggaaccctggtcaccgtctcgagc

SEQ ID NO: 852 - DNA, 348 bp, Artificial Sequence
  Description of Artificial Sequence: Synthetic polynucleotide
gaggtgcagctgttggcgtctgggggaggcttggtacagcctggggggtccctgcgtctctcctgcgcagcctccggattcacctttgaggaggaggagatgatttgggtccgccaggctccagggaagggtctagagtgggtctcagctattagtaggcccggtacgagcacatactacgcagactccgtgaagggccggttcaccatctcccgcgacaattccaagaacacgctgtatctgcaaatgaacagcctgcgtgccgaggataccgcggtatattactgtgggaaagagccgtttcgttatgactactggggtcagggaaccctggtcaccgtctcgagc

SEQ ID NO: 853 - DNA, 348 bp, Artificial Sequence
  Description of Artificial Sequence: Synthetic polynucleotide
gaggtgcagctgttggcgtctgggggaggcttggtacagcctggggggtccctgcgtctctcctgcgcagcctccggattcacctttgaggaggaggagatgatttgggtccgccaggctccagggaagggtctagagtgggtctcagctattagtcggatgggtttcagcacatactacgcagactccgtgaagggccggttcaccatctcccgcgacaattccaagaacacgctgtatctgcaaatgaacagcctgcgtgccgaggataccgcggtatattactgtgggaaagagccgtttcgttatgactactggggtcagggaaccctggtcaccgtctcgagc

SEQ ID NO: 854 - DNA, 348 bp, Artificial Sequence
  Description of Artificial Sequence: Synthetic polynucleotide
gaggtgcagctgttggcgtctgggggaggcttggtacagcctggggggtccctgcgtctctcctgcgcagcctccggattcacctttgaggaggaggagatgatttgggtccgccaggctccagggaagggtctagagtgggtctcagctattagtcggtggggtcacagcacatactacgcagactccgtgaagggccggttcaccatctcccgcgacaattccaagaacacgctgtatctgcaaatgaacagcctgcgtgccgaggataccgcggtatattactgtgggaaagagccgtttcgttatgactactggggtcagggaaccctggtcaccgtctcgagc

SEQ ID NO: 855 - DNA, 348 bp, Artificial Sequence
  Description of Artificial Sequence: Synthetic polynucleotide
gaggtgcagctgttggcgtctgggggaggcttggtacagcctggggggtccctgcgtctctcctgcgcagcctccggattcacctttgaggaggaggagatgatttgggtccgccaggctccagggaagggtctagagtgggtctcagctattagtcgcctcggttggagcacatactacgcagactccgtgaagggccggttcaccatctcccgcgacaattccaagaacacgctgtatctgcaaatgaacagcctgcgtgccgaggataccgcggtatattactgtgggaaagagccgtttcgttatgactactggggtcagggaaccctggtcaccgtctcgagc

SEQ ID NO: 856 - DNA, 348 bp, Artificial Sequence
  Description of Artificial Sequence: Synthetic polynucleotide
gaggtgcagctgttggcgtctgggggaggcttggtacagcctggggggtccctgcgtctctcctgcgcagcctccggattcacctttgaggaggaggagatgatttgggtccgtcaggctccagggaagggtctagagtgggtctcagctattagtcgctggggtgccagcacatactacgcagactccgtgaagggccggttcaccatctcccgcgacaattccaagaacacgctgtatctgcaaatgaacagcctgcgtgccgaggataccgcggtatattactgtgggaaagagccgtttcgttatgactactggggtcagggaaccctggtcaccgtctcgagc

SEQ ID NO: 857 - DNA, 348 bp, Artificial Sequence
  Description of Artificial Sequence: Synthetic polynucleotide
gaggtgcagctgttggcgtctgggggaggcttggtacagcctggggggtccctgcgtctctcctgcgcagcctccggattcacctttgaggaggaggagatgatttgggtccgtcaggctccagggaagggtctagagtgggtctcagctattagtaggcagggtgggagcacatactacgcagactccgtgaagggccggttcaccatctcccgtgacaattccaagaacacgctgtatctgcaaatgaacagcctgcgtgccgaggataccgcggtatattactgtgggaaagagccgtttcgttatgactactggggtcagggaaccctggtcaccgtctcgagc

SEQ ID NO: 858 - DNA, 348 bp, Artificial Sequence
  Description of Artificial Sequence: Synthetic polynucleotide
gaggtgcagctgttggcgtctgggggaggcttggtacagcctggggggtccctgcgtctctcctgcgcagcctccggattcacctttgaggaggaggagatgatttgggtccgccaggctccagggaagggtctagagtgggtctcagctattagtgtgtccggttggagcacatactacgcagactccgtgaagggccggttcaccatctcccgcgacaattccaagaacacgctgtatctgcaaatgaacagcctgcgtgccgaggataccgcggtatattactgtgggaaagagccgtttcgttatgactactggggtcagggaaccctggtcaccgtctcgagc

SEQ ID NO: 859 - DNA, 348 bp, Artificial Sequence
  Description of Artificial Sequence: Synthetic polynucleotide
gaggtgcagctgttggcgtctgggggaggcttggtacagcctggggggtccctgcgtctctcctgcgcagcctccggattcacctttgaggaggaggagatgatttgggtccgccaggctccagggaagggtctagagtgggtctcagctattagtcggtggggttggagcacatactacgcagactccgtgaagggccggttcaccatctcccgcgacaattccaagaacacgctgtatctgcaaatgaacagcctgcgtgccgaggataccgcggtatattactgtgggaaagagccgtttcgttatgactactggggtcagggaaccctggtcaccgtctcgagc

SEQ ID NO: 860 - DNA, 348 bp, Artificial Sequence
  Description of Artificial Sequence: Synthetic polynucleotide
gaggtgcagctgttggcgtctgggggaggcttggtacagcctggggggtccctgcgtctctcctgcgcagcctccggattcacctttgaggaggaggagatgatttgggtccgccaggctccagggaagggtctagagtgggtctcagctattagtcggaacggtctgagcacatactacgcagactccgtgaagggccggttcaccatctcccgcgacaattccaagaacacgctgtatctgcaaatgaacagcctgcgtgccgaggataccgcggtatattactgtgggaaagagccgtttcgttatgactactggggtcagggaaccctggtcaccgtctcgagc

SEQ ID NO: 861 - DNA, 348 bp, Artificial Sequence
  Description of Artificial Sequence: Synthetic polynucleotide
gaggtgcagctgttggcgtctgggggaggcttggtacagcctggggggtccctgcgtctctcctgcgcagcctccggattcacctttgaggaggaggagatgatttgggtccgccaggctccagggaagggtctagagtgggtctcagctattagtgggctgggttggagcacatactacgcagactccgtgaagggccggttcaccatctcccgcgacaattccaagaacacgctgtatctgcaaatgaacagcctgcgtgccgaggataccgcggtatattactgtgggaaagagccgtttcgttatgactactggggtcagggaaccctggtcaccgtctcgagc

SEQ ID NO: 862 - DNA, 348 bp, Artificial Sequence
  Description of Artificial Sequence: Synthetic polynucleotide
gaggtgcagctgttggcgtctgggggaggcttggtacagcctggggggtccctgcgtctctcctgcgcagcctccggattcacctttgaggaggaggagatgatttgggtccgccaggctccagggaagggtctagagtgggtctcagctattagtgcgttgggttggagcacatactacgcagactccgtgaagggccggttcaccatctcccgcgacaattccaagaacacgctgtatctgcaaatgaacagcctgcgtgccgaggataccgcggtatattactgtgggaaagagccgtttcgttatgactactggggtcagggaaccctggtcaccgtctcgagc

SEQ ID NO: 863 - DNA, 348 bp, Artificial Sequence
  Description of Artificial Sequence: Synthetic polynucleotide
gaggtgcagctgttggcgtctgggggaggcttggtacagcctggggggtccctgcgtctctcctgcgcagcctccggattcacctttgaggaggaggagatgatttgggtccgccaggctccagggaagggtctagagtgggtctcagctattagtcgcaggggttacagcacatactacgcagactccgtgaagggccggttcaccatctcccgcgacaattccaagaacacgctgtatctgcaaatgaacagcctgcgtgccgaggataccgcggtatattactgtgggaaagagccgtttcgttatgactactggggtcagggaaccctggtcaccgtctcgagc

SEQ ID NO: 864 - DNA, 348 bp, Artificial Sequence
  Description of Artificial Sequence: Synthetic polynucleotide
gaggtgcagctgttggcgtctgggggaggcttggtacagcctggggggtccctgcgtctctcctgcgcagcctccggattcacctttgaggaggaggagatgatttgggtccgtcaggctccagggaagggtctagagtgggtctcagctattagtaggcacggttggagcacatactacgcagactccgtgaagggccggttcaccatctcccgcgacaattccaagaacacgctgtatctgcaaatgaacagcctgcgtgccgaggataccgcggtatattactgtgggaaagagccgtttcgttatgactactggggtcagggaaccctggtcaccgtctcgagc

SEQ ID NO: 865 - DNA, 348 bp, Artificial Sequence
  Description of Artificial Sequence: Synthetic polynucleotide
gaggtgcagctgttggcgtctgggggaggcttggtacagcctggggggtccctgcgtctctcctgcgcagcctccggattcacctttgaggaggaggagatgatttgggtccgccaggctccagggaagggtctagagtgggtctcaagcattagcaggagtggtggtagcacatactacgcagactccgtgaagggccggttcaccatctcccgcgacaattccaagaacacgctgtatctgcaaatgaacagcctgcgtgccgaggataccgcggtatattactgtgggaaagagccgtttcgttatgactactggggtcagggaaccctggtcaccgtctcgagc

SEQ ID NO: 866 - DNA, 348 bp, Artificial Sequence
  Description of Artificial Sequence: Synthetic polynucleotide
gaggtgcagctgttggcgtctgggggaggcttggtacagcctggggggtccctgcgtctctcctgcgcagcctccggattcacctttgaggaggaggagatgatttgggtccgccaggctccagggaagggtctagagtgggtctcagctattagtcggatcggtaacagcacatactacgcagactccgtgaagggccggttcaccatctcccgcgacaattccaagaacacgctgtatctgcaaatgaacagcctgcgtgccgaggataccgcggtatattactgtgggaaagagccgtttcgttatgactactggggtcagggaaccctggtcaccgtctcgagc

SEQ ID NO: 867 - DNA, 348 bp, Artificial Sequence
  Description of Artificial Sequence: Synthetic polynucleotide
gaggtgcagctgttggcgtctgggggaggcttggtacagcctggggggtccctgcgtctctcctgcgcagcctccggattcacctttgaggaggaggagatgatttgggtccgccaggctccagggaagggtctagagtgggtctcagctattagtgggcacggttggagcacatactacgcagactccgtgaagggccggttcaccatctcccgcgacaattccaagaacacgctgtatctgcaaatgaacagcctgcgtgccgaggataccgcggtatattactgtgggaaagagccgtttcgttatgactactggggtcagggaaccctggtcaccgtctcgagc

SEQ ID NO: 868 - DNA, 348 bp, Artificial Sequence
  Description of Artificial Sequence: Synthetic polynucleotide
gaggtgcagctgttggcgtctgggggaggcttggtacagcctggggggtccctgcgtctctcctgcgcagcctccggattcacctttgaggaggaggagatgatttgggtccgccaggctccagggaagggtctagagtgggtctcagctatttcgaggtggggtggtagcacatactacgcagactccgtgaagggccggttcaccatctcccgcgacaattccaagaacacgctgtatctgcaaatgaacagcctgcgtgccgaggataccgcggtatattactgtgggaaagagccgtttcgttatgactactggggtcagggaaccctggtcaccgtctcgagc

SEQ ID NO: 869 - DNA, 348 bp, Artificial Sequence
  Description of Artificial Sequence: Synthetic polynucleotide
gaggtgcagctgttggcgtctgggggaggcttggtacagcctggggggtccctgcgtctctcctgcgcagcctccggattcacctttgaggaggaggagatgatttgggtccgtcaggctccagggaagggtctagagtgggtctcagctattagtggtagtggtggtagcacatactacgcagactccgtgaagggccggttcaccatctcccgcgacaattccaagaacacgctgtatctgcaaatgaacagcctgcgtgccgaggataccgcggtatattactgtgggaaagagccgttcatgtatgactactggggtcagggaaccctggtcaccgtctcgagc

SEQ ID NO: 870 - DNA, 348 bp, Artificial Sequence
  Description of Artificial Sequence: Synthetic polynucleotide
gaggtgcagctgttggcgtctgggggaggcttggtacagcctggggggtccctgcgtctctcctgcgcagcctccggattcacctttgaggaggaggagatgatttgggtccgtcaggctccagggaagggtctagagtgggtctcagctattagtggtagtggtggtagcacatactacgcagactccgtgaagggccggttcaccatctcccgcgacaattccaagaacacgctgtatctgcaaatgaacagcctgcgtgccgaggataccgcggtatattactgtgggaaagagccgttcccgtacgactactggggtcagggaaccctggtcaccgtctcgagc

SEQ ID NO: 871 - DNA, 348 bp, Artificial Sequence
  Description of Artificial Sequence: Synthetic polynucleotide
gaggtgcagctgttggcgtctgggggaggcttggtgcagcctggggggtccctgcgtctctcctgcgcagcctccggattcacctttgaggaggaggagatgatttgggtccgtcaggctccagggaagggtctagagtgggtctcagctattagtggtagtggtggtggcacatactacgcagactccgtgaagggccggttcaccatctcccgcgacaattccaagaacacgctgtatctgcaaatgaacagcctgcgtgccgaggataccgcggtatattactgtgggaaagagccgtttcgttatgactactggggtcagggaaccctggtcaccgtctcgagc

SEQ ID NO: 872 - DNA, 348 bp, Artificial Sequence
  Description of Artificial Sequence: Synthetic polynucleotide
gaggtgcagctgttggcgtctgggggaggcttggtacagcctggggggtccctgcgtctctcctgcgcagcctccggattcacctttgaggaggaggagatgatttgggtccgtcaggctccagggaagggtctagagtgggtctcagctattagtggtagtggtggtagcacatactacgcagactccgtgaagggccggttcaccatctcccgcgacaattccaagaacacgctgtatctgcaaatgaacagcctgcgtgccgaggataccgcggtatattactgtgggaaagagccgttgtactatgactactggggtcagggaaccctggtcaccgtctcgagc

SEQ ID NO: 873 - DNA, 348 bp, Artificial Sequence
  Description of Artificial Sequence: Synthetic polynucleotide
gaggtgcagctgttggcgtctgggggaggcttggtacagcctggggggtccctgcgtctctcctgcgcagcctccggattcacctttgaggaggaggagatgatttgggtccgtcaggctccagggaagggtctagagtgggtctcagctattagtggtagtggtggtagcacatactacgcagactccgtgaagggccggttcaccatctcccgcgacaattccaagaacacgctgtatctgcaaatgaacagcctgcgtgccgaggataccgcggtatattactgtgggaaagagcccatgtactatgactactggggtcagggaaccctggtcaccgtctcgagc

SEQ ID NO: 874 - DNA, 348 bp, Artificial Sequence
  Description of Artificial Sequence: Synthetic polynucleotide
gaggtgcagctgttggcgtctgggggaggcttggtacagcctggggggtccctgcgtctctcctgcgcagcctccggattcacctttgaggaggaggagatgatttgggtccgccaggctccagggaagggtctagagtgggtctcagctattagtaggaacggtttcagcacatactacgcagactccgtgaagggccggttcaccatctcccgcgacaattccaagaacacgctgtatctgcaaatgaacagcctgcgtgccgaggataccgcggtatattactgtgggaaagagccgtttcgttatgactactggggtcagggaaccctggtcaccgtctcgagc

SEQ ID NO: 875 - DNA, 348 bp, Artificial Sequence
  Description of Artificial Sequence: Synthetic polynucleotide
gaggtgcagctgttggcgtctgggggaggcttggtacagcctggggggtccctgcgtctctcctgcgcagcctccggattcacctttgaggaggaggagatgatttgggtccgccaggctccagggaagggtctagagtgggtctcagctattagtcgcacgggtgggagcacatactacgcagactccgtgaagggccggttcaccatctcccgcgacaattccaagaacacgctgtatctgcaaatgaacagcctgcgtgccgaggataccgcggtatattactgtgggaaagagccgtttcgttatgactactggggtcagggaaccctggtcaccgtctcgagc

SEQ ID NO: 876 - DNA, 348 bp, Artificial Sequence
  Description of Artificial Sequence: Synthetic polynucleotide
gaggtgcagctgttggcgtctgggggaggcttggtacagcctggggggtccctgcgtctctcctgcgcagcctccggattcacctttgaggaggaggagatgatttgggtccgccaggctccagggaagggtctagagtgggtctcagctattagtcgggagggtgggagcacatactacgcagactccgtgaagggccggttcaccatctcccgcgacaattccaagaacacgctgtatctgcaaatgaacagcctgcgtgccgaggataccgcggtatattactgtgggaaagagccgtttcgttatgactactggggtcagggaaccctggtcaccgtctcgagc

SEQ ID NO: 877 - DNA, 348 bp, Artificial Sequence
  Description of Artificial Sequence: Synthetic polynucleotide
gaggtgcagctgttggcgtctgggggaggcttggtacagcctggggggtccctgcgtctctcctgcgcagcctccgggttcccctttgaggaggaggagatgatttgggtccgccaggctccagggaagggtctagagtgggtctcagctattagtcggcagggttggagcacatactacgcagactccgtgaagggccggttcaccatctcccgcgacaattccaagaacacgctgtatctgcaaatgaacagcctgcgtgccgaggataccgcggtatattactgtgggaaagagccgtttcgttatgactactggggtcagggaaccctggtcaccgtctcgagc

SEQ ID NO: 878 - DNA, 348 bp, Artificial Sequence
  Description of Artificial Sequence: Synthetic polynucleotide
gaggtgcagctgttggcgtctgggggaggcttggtacagcctggggggtccctgcgtctctcctgcgcagcctccggattcacctttgaggaggaggagatgatttgggtccgccaggctccagggaagggtctagagtgggtctcagctattagtaggggcggtgggagcacatactacgcagactccgtgaagggccggttcaccatctcccgcgacaattccaagaacacgctgtatctgcaaatgaacagcctgcgtgccgaggataccgcggtatattactgtgggaaagagccgtttcgttatgactactggggtcagggaaccctggtcaccgtctcgagc

SEQ ID NO: 879 - DNA, 348 bp, Artificial Sequence
  Description of Artificial Sequence: Synthetic polynucleotide
gaggtgcagctgttggcgtctgggggaggcttggtacagcctggggggtccctgcgtctctcctgcgcagcctccggattcacctttgaggaggaggagatgatttgggtccgccaggctccagggaagggtctagagtgggtctcagctattagtcgcacgggttacagcacatactacgcagactccgtgaagggccggttcaccatctcccgcgacaattccaagaacacgctgtatctgcaaatgaacagcctgcgtgccgaggataccgcggtatattactgtgggaaagagccgtttcgttatgactactggggtcagggaaccctggtcaccgtctcgagc

SEQ ID NO: 880 - DNA, 348 bp, Artificial Sequence
  Description of Artificial Sequence: Synthetic polynucleotide
gaggtgcagctgttggcgtctgggggaggcttggtacagcctggggggtccctgcgtctctcctgcgcagcctccggattcacctttgaggaggaggagatgatttgggtccgccaggctccagggaagggtctagagtgggtctcagctattagtaggaacggtaggagcacatactacgcagactccgtgaagggccggttcaccatctcccgcgacaattccaagaacacgctgtatctgcaaatgaacagcctgcgtgccgaggataccgcggtatattactgtgggaaagagccgtttcgttatgactactggggtcagggaaccctggtcaccgtctcgagc

SEQ ID NO: 881 - DNA, 348 bp, Artificial Sequence
  Description of Artificial Sequence: Synthetic polynucleotide
gaggtgcagctgttggcgtctgggggaggcttggtacagcctggggggtccctgcgtctctcctgcgcagcctccggattcacctttgaggaggaggagatgatttgggtccgccaggctccagggaagggtctagagtgggtctcagctattagtaggaacggttacagcacatactacgcagactccgtgaagggccggttcaccatctcccgcgacaattccaagaacacgctgtatctgcaaatgaacagcctgcgtgccgaggataccgcggtatattactgtgggaaagagccgtttcgttatgactactggggtcagggaaccctggtcaccgtctcgagc

SEQ ID NO: 882 - DNA, 348 bp, Artificial Sequence
  Description of Artificial Sequence: Synthetic polynucleotide
gaggtgcagctgttggcgtctgggggaggcttggtacagcctggggggtccctgcgtctctcctgcgcagcctccggattcacctttgaggaggaggagatgatttgggtccgccaggctccagggaagggtctagagtgggtctcagctattagtaggaagggtagcagcacatactacgcagactccgtgaagggccggttcaccatctcccgcgacaattccaagaacacgctgtatctgcaaatgaacagcctgcgtgccgaggataccgcggtatattactgtgggaaagagccgtttcgttatgactactggggtcagggaaccctggtcaccgtctcgagc

SEQ ID NO: 883 - DNA, 348 bp, Artificial Sequence
  Description of Artificial Sequence: Synthetic polynucleotide
gaggtgcagctgttggcgtctgggggaggcttggtacagcctggggggtccctgcgtctctcctgcgcagcctccggattcacctttgaggaggaggagatgatttgggtccgccaggctccagggaagggtctagagtgggtctcagctattagtcggggcggttggagcacatactacgcagactccgtgaagggccggttcaccatctcccgcgacaattccaagaacacgctgtatctgcaaatgaacagcctgcgtgccgaggataccgcggtatattactgtgggaaagagccgtttcgttatgactactggggtcagggaaccctggtcaccgtctcgagc

SEQ ID NO: 884 - DNA, 348 bp, Artificial Sequence
  Description of Artificial Sequence: Synthetic polynucleotide
gaggtgcagctgttggcgtctgggggaggcttggtacagcctggggggtccctgcgtctctcctgcgcagcctccggattcacctttgaggaggaggagatgatttgggtccgccaggctccagggaagggtctagagtgggtctcagctattagtcgctcgggttacagcacatactacgcagactccgtgaagggccggttcaccatctcccgcgacaattccaagaacacgctgtatctgcaaatgaacagcctgcgtgccgaggataccgcggtatattactgtgggaaagagccgtttcgttatgactactggggtcagggaaccctggtcaccgtctcgagc

SEQ ID NO: 885 - DNA, 348 bp, Artificial Sequence
  Description of Artificial Sequence: Synthetic polynucleotide
gaggtgcagctgttggcgtctgggggaggcttggtacagcctggggggtccctgcgtctctcctgcgcagcctccggattcacctttgaggaggaggagatgatttgggtccgccaggctccagggaagggtctagagtgggtctcagctattagtaggaacggtatgagcacatactacgcagactccgtgaagggccggttcaccatctcccgcgacaattccaagaacacgctgtatctgcaaatgaacagcctgcgtgccgaggataccgcggtatattactgtgggaaagagccgtttcgttatgactactggggtcagggaaccctggtcaccgtctcgagc

SEQ ID NO: 886 - DNA, 348 bp, Artificial Sequence
  Description of Artificial Sequence: Synthetic polynucleotide
gaggtgcagctgttggagtctgggggaggcttggtacagcctggggggtccctgcgtctctcctgcgcagcctccggattcacctttgaggaggaggagatgatttgggtccgccaggctccagggaagggtctagagtgggtctcagctattagtaggaacggttacagcacatactacgcagactccgtgaagggccggttcaccatctcccgcgacaattccaagaacacgctgtatctgcaaatgaacagcctgcgtgccgaggataccgcggtatattactgtgggaaagagccgtttcgttatgactactggggtcagggaaccctggtcaccgtctcgagc

SEQ ID NO: 887 - DNA, 348 bp, Artificial Sequence
  Description of Artificial Sequence: Synthetic polynucleotide
gaggtgcagctgttggagtctggggaaggcttggtacagcctggggggtccctgcgtctctcctgtgcagcctccggattcacctttactgagcatgagatgatttgggtccgccaggctccagggaagggtctggagtgggtctcatctatttcgggtaatggtgctaatacatactacgcagactccgtgaagggccggttcaccatctcccgcgacaattccaagaacacgctgtatctgcaaatgaacagcctgcgtcccgaggacaccgcggtatattactgtgcgaaagagccgcttaggtttgactactggggccagggaaccctggtcaccgtctcgagc

SEQ ID NO: 888 - DNA, 348 bp, Artificial Sequence
  Description of Artificial Sequence: Synthetic polynucleotide
gaggtgcagctgttggagtctgggggaggcttggtacagcctggggggtccctgcgtctctcctgtgcagcctccggatccacctttactgagtatgagatgatttgggtccgccaggctccagggaagggtctggagtggatctcatctatttcgggtaatggtgctaatacatactacgcagactccgtgaagggccggttcaccatctcccgcgacaattccaagaacacgctgtatctgcaaatgaacagcctgcgtgccgaggacaccgcggtatatttctgtgcgaaagagccgcttaggtttgactacaggggtcagggaaccctggtcaccgtctcgagc

SEQ ID NO: 889 - DNA, 348 bp, Artificial Sequence
  Description of Artificial Sequence: Synthetic polynucleotide
gaggtgcagctgttggagcctgggggaggcttggtacagcctggggggtccctgcgtctctcctgtgcagcctccggattcacctttactgagtatgagatgatttgggtccgcaaggctccagggaagggtatggagtgggtctcatctatttcgggtaatggtgctaatacatactacgcagactccgtgaagggccggttcaccatctcccgcgacaattccaagaacatgctgtatctgcaaatgaacagcctgcgtgccgaggacaccgcggtatattactgtgcgaaagagccgcttaggtttggctactggggtcagggtaccctggtcaccgtctcgagc

SEQ ID NO: 890 - DNA, 348 bp, Artificial Sequence
  Description of Artificial Sequence: Synthetic polynucleotide
gaggtgcagctgttggattctgggggaggcttggtacagcctggggggtcactgcgtctctcctgtgcagcctccggattcacctttactgagtatgagatgatttgggtccgccaggctccagggaagggtctggagtgggtctcatctatttcgggtaatggtgctaatacatactacgcagactccgtgaagggccggttcaccatctcccgcgacaattccaagaacacgctgtatctacaaatgaacagcctgcgtgccgaggacaccgcggtatattactgtgcgaaagagccgcttaggtttgactactggggtcggggaaccctggtcaccgtctcgagc

SEQ ID NO: 891 - DNA, 348 bp, Artificial Sequence
  Description of Artificial Sequence: Synthetic polynucleotide
gaggtgcagctgttggggtcagggggaggcttggtacagcctggggggtccctgcgtctctcctgtgcagcctccggattcacctttactgagtatgagatgatttgggtccgccaggctccagggaagagtctggagtgggtctcatctatttcgggtaatggtgctaatacatactacgcagactccgtgaagggccggttcaccatctcccgcgacaattccaagaacacgctgtatctgcaaatgaacagcctgcgtgccgaggacaccgcggtatattactgtgcgaaagagccgcttaggtatgacgactggggtcagggaaccctggtcaccgtctcgagc

SEQ ID NO: 892 - DNA, 348 bp, Artificial Sequence
  Description of Artificial Sequence: Synthetic polynucleotide
gaggtgcagccgttggagtctgggggaggcttggtacagcctggggggtccctgcgtctctcctgttcagcctccggattcacctttaatgagtatgagatgatttgggtccgccaggctccagggaagggtctggagtgggtctcatctatttcgggtaatggtgctaatacatactacgcagactccgtgaagggccggttcaccatctcccgcgacaattccaagaacacgctgtatctgcaaatgaacagcctgcgtgccgaggacaccgcggtatattactgtgcgaaagagccgcttaggtttgactactggggtcagggaaccctggtcaccgtctcgagc

SEQ ID NO: 893 - DNA, 348 bp, Artificial Sequence
  Description of Artificial Sequence: Synthetic polynucleotide
gaggtgcagctgttggagtctggggaaggcttggtacagcctggggggtccctgcgtctctcctgtgcagcctccggattcacctttgctgagtatgagatgatttgggtccgccaggctccagggaaaggtctggagtgggtctcatctatttcgggtaatggtgctaatacatactacgcagactccgtgaagggccggttcaccatctcccgcgacaattccaagaacacgctgtatctgcaaatgaacagcctgcgtgccgaggacaccgcggtatattactgtgcgaaagagccgcttaggtttgactactggggtcagggaaccctggtcaccgtctcgagc

SEQ ID NO: 894 - DNA, 348 bp, Artificial Sequence
  Description of Artificial Sequence: Synthetic polynucleotide
gaggtgcagctgttggaccctgggggaggcttggtacagcctggggggtccctgcgtctctcctgtgcagcctccggattcacctttactgagtctgagatgatttgggtccgccaggctccagggaagggtctggagtgggtctcatctatttcgggaaatggtgctaatacatactacgcggactccgtgaagggccggttcaccatctcccgcgacaattccaagaacacgctgtatctgcaaatgaacagcctgcgtgccgaggacaccgcggtatattactgtgcgaaagagccgcttaggtttgactactggggtcagggaaccctggtcaccgtctcgagc

SEQ ID NO: 895 - DNA, 348 bp, Artificial Sequence
  Description of Artificial Sequence: Synthetic polynucleotide
gaggtgcagctgttggagcctgggggaggcttggtacagcctggggggtccctgcgtctctcctgtgcagcctccggattcacctttactgagtatgagatgatttgggtccgcaaggctccagggaagggtatggagtgggtctcatctatttcgggtaatggtgctaatacatactacgcagactccgtgaagggccggttcaccatctcccgcgacaattccaagaacacgctgtatctgcaaatgaacagcctgcgtcccgaggacaccgcggtatattactgtgcgaaagagccgcttaggtttgacgactggggtcagggaaccctggtcaccgtctcgagc

SEQ ID NO: 896 - DNA, 348 bp, Artificial Sequence
  Description of Artificial Sequence: Synthetic polynucleotide
gaggtgcagctgttggagtctggggtaggcttggtacagcctggggggtccctgcgtctctcctgtgcagcctccggattcacctttactgagtatgagatgatttgggtccgcaaggccccagggaagggtctggagtgggtctcatctatttcgggtaatggtgctaatacatactacgcagactccgtgaagggccggttcaccatctcccgcgacaattccaagaacacgctgtatctgcaaatgaacagcctgcgtgccgaggacaccgcggtatattactgtgcgaaagaaccgcttaggtttgacaactggggtcagggaaccctggtcaccgtctcgagc

SEQ ID NO: 897 - DNA, 348 bp, Artificial Sequence
  Description of Artificial Sequence: Synthetic polynucleotide
gaggtgcagttgttggagtctcggggaggcttggtacagcctggggggtccctgcgtctctcctgtgcagcctccggattcacctttactgagcatgagatgatttgggtccgccaggctccagggaagggtctggagtgggtctcatctatttcgggtaatggtgctaatacatactacgcagactccgtgaagggccggttctccgtctcccgcgacaattccaagaacacgctgtatctgcaaatgaacagcctgcgtgccgaggacaccgcggtatattactgtgcgaaagagccgcttaggtttgactactggggtcagggaaccctggtcaccgtctcgagc

SEQ ID NO: 898 - DNA, 348 bp, Artificial Sequence
  Description of Artificial Sequence: Synthetic polynucleotide
gaggtgcagccgttggagtctgggggaggcttggtacagcctggggggtccctgcgtctctcctgtgctgcctccggattcacctttactgagtatgagatgatttgggtccgccaggctccagggaagggtctggagtgggtctcatctatttcgggtaatggtgctaatacatactacgcagactccgtgaagggccggttcaccatctcccgcgacaattccaagaacacgctgtatctgcaaatgaacagcctgcgtgccgaggacaccgcggtatattactgtgcgaaagagccgcttaggtttgactactggggtcagggaaccctggtcaccgtctcgagc

SEQ ID NO: 899 - DNA, 348 bp, Artificial Sequence
  Description of Artificial Sequence: Synthetic polynucleotide
gaggtgcagctgttggagtctgcgggaggcttggtacagcctggggggtccctgcgtctctcctgtgcagcctccggattcacctttgctgagtatgagatgatttgggtccgccaggctccagggaagggtctggagtgggtctcatcaatttcgggtaatggtgctaatacatactacgcagactccgtgaagggccggttcaccatctcccgcgacaattccaagaacacgctgtatctgcaaatgaacagcctgcgtgccgaggacaccgcggtatattactgtgcgaaagagccgcttaggtttgactactggggtcagggagccctggtcaccgtctcgagc

SEQ ID NO: 900 - DNA, 348 bp, Artificial Sequence
  Description of Artificial Sequence: Synthetic polynucleotide
gaggtgcagctgttggagcctgggggaggcttggtacagcctggggggtcgctgcgtctctcctgtgcagcctccggattcacctttactgagtatgagatgatttgggtccgccaggctccagggaagggtctggagtgggtctcatctatttcgggtaatggtgctaatacatactacgcagactccgtgaagggccggttcaccatctcccgcgacaattccaagaacacgctgtatctgcaaatgaacagcctgcgtgccgaggacaccgcggtatattactgtgcgaaagagccgcttaggtttgacaactggggtcagggaaccctggtcaccgtctcgagc

SEQ ID NO: 901 - DNA, 369 bp, Artificial Sequence
  Description of Artificial Sequence: Synthetic polynucleotide
gaggtgcagctgttggagtctgggggaggcttggtacagcctggggggtctctgcgtctctcctgtacagcctccggattcacctttaatatgtatgagatgtcgtgggtccgccaggctccagggaagggtctagagtgggtctcaggtattagtagacgtggttttactacatactacgcagactccgtgaagggccggttcaccatctcccgcgacaattccaagaacacgctgtatctgcaaatgaacagcctgcgtgccgaggataccgcggtatattactgtgcgaaagagccgattacgtatgatttgaggtatgcgcgttttgactactcgggtcagggaaccctggtcaccgtctcgagc

SEQ ID NO: 902 - DNA, 369 bp, Artificial Sequence
  Description of Artificial Sequence: Synthetic polynucleotide
gaggagcagctgttggagtctgggggaggcttggtacagcctggggggtccctgcgtctctcctgtacagcctccggattcacctttaatatgtatgagatgtcgtgggtccgccaggctccagggaagggtctagagtgggtctcaggtattagtagacgtggttttactacatactacgcagactccgtgaagggccggttcaccatctcccgcgacaattccaagaacacgctgtatctgcaaatgaacagcctgcgtgccgaggataccgcggtatattactgtgcgaaagagccgattacgtatgctacgaggtatgcgcgttttgactactggggtcagggaaccctggtcaccgtctcgagc

SEQ ID NO: 903 - DNA, 369 bp, Artificial Sequence
  Description of Artificial Sequence: Synthetic polynucleotide
gaggtgcagctgttggagtctgggggaggcttggtacagcctggggggtccctgcgtctctcctgtacagcctccggattcacctttaatatgtatgagatgtcgtgggtccgccaggctccagggaagggtctagagtgggtctcaggtattagtaggcgtggttttactacatactacgcagactccgtgaagggccggttcaccatctcccgcgacaatttcaagaacacgctgtatctgcaaatgaacagcctgcgtgccgaggataccgcggtatattactgtgcgaaagagccgattacgtatgatatgaggtatgcgcgttttgactacgggggtcagggaaccctggtcaccgtctcgagc

SEQ ID NO: 904 - DNA, 369 bp, Artificial Sequence
  Description of Artificial Sequence: Synthetic polynucleotide
gaggtgcagctgttggagtctgggggaggcttggtacagcctggggggtccctgcgtctctcctgtacagcctccggattcacctttaatatgtatgagatgtcgtgggtccgccaggctccagggaagggtctagagtgggtctcaggtattagtaggcgtggttttactacatactacgcagactccgtgaagggccggttcaccatctcccgcgacaattccaagaacacgctgtatctgcaaatgaacagcctgcgtgccgaggataccgcggtatattactgtgcgaaagagccgattacgtatgatatgaggtatgcgcgttttgacaactggggtcagggaaccctggtcaccgtctcgaac

SEQ ID NO: 905 - DNA, 369 bp, Artificial Sequence
  Description of Artificial Sequence: Synthetic polynucleotide
gaggtgcagctgttggagtctgggggaggcttggtacagcctggggggtccctgcgtctctcctgtacagcctccggattcacctttaatacgtatgagatgtcgtgggtccgccaggctccagggaagggtctagagtgggtctcaggtattggtaggcgtggttttactacatactacgcagactccgtgaagggccggttcaccatctcccgcgacaattccaagaacacgctgtatctgcaaatgaacagcctgcgtgccgaggataccgcggtatattactgtgcgaaagagccgattacgtatgatttgaggtatgcgcgttttgactactcgggtcagggaaccctggtcaccgtctcgagc

SEQ ID NO: 906 - DNA, 369 bp, Artificial Sequence
  Description of Artificial Sequence: Synthetic polynucleotide
gaggtgcagctgatggagtcagggggaggcttggtacagcctggggggtccctgcgtctctcctgtacagcctccggattctcctttaatatgtatgagatgtcgtgggtccgccaggctccagggaaaggtctagagtgggtctcaggtattagtaggcgtggttatactacatactacgcagactccgtgaagggccggttcaccatctcccgcgacaattccaagaacacgctgtatctgcaaatgaacagcctgcgtgccgaggataccgcggtatattactgtgcgaaagagccgattacgtatgatatgaggtatgcgcgttttgactactggggtcggggaaccctggtcaccgtctcgagc

SEQ ID NO: 907 - DNA, 369 bp, Artificial Sequence
  Description of Artificial Sequence: Synthetic polynucleotide
gaggtgcagctgttggagtctgggggaggcttggtgcagcctggggggtccctgcgtctctcctgtacagcctccggattcgcctttaatatgtatgagatgtcgtgggtccgccaggctccagggaagggactagagtgggtctcaggtattagtaggcatggttttactacgtactacgcagactccgtgaagggccggttcaccgtctcccgcgacaattccaagaacacgctgtatctgcaaatgaacagcctgcgtgccgaggataccgcggtatattactgtgcgaaagagccgattacgtatgatatgcggtatgcgcgttctgactactggggtcagggaaccctggtcaccgtctcgagc

SEQ ID NO: 908 - DNA, 369 bp, Artificial Sequence
  Description of Artificial Sequence: Synthetic polynucleotide
gaggtgcagctgttggagtctgggggaggcttggtacagcctggggggtccctgcgtctctcctgtacagcctccggattcacctttaatatgtatgagatgtcgtgggtccgccaggctccagggaagggtctagagtgggtctcaggtattagtaggcgtggttttactacatactacgcagactccgtgaagggccggttcaccatctcccgcgacaattccaagaacacgctgtatctgcaaatgaacagcctgcgtgccgaggataccgcggtatatttctgtgcgaaagagccgattacgtatgatatgaggtatgcgcgttctgactactggggtcagggaaccctggtcaccgtctcgagc

SEQ ID NO: 909 - DNA, 369 bp, Artificial Sequence
  Description of Artificial Sequence: Synthetic polynucleotide
gaggtgcagctgttggagtctggggggggcttggttcagcctggggggtccctgcgtctctcctgtacagcctccgggttcacctttaatatgtatgagatgtcgtgggtccgccaggctccagggaagggtctagagtgggtctcaggtattagtaggcgtggttttactacatactacgcagactccgtgaagggccggttcaccatctcccgcgacaattccaagaacacgctgtatctgcaaatgaacagcctgcgtgccgaggataccgcggtatattactgtgcgaaagagccgattacgtattctatgaggtatgcgcgttttgactactcgggtctgggaaccatggtcaccgtctcgagc

SEQ ID NO: 910 - DNA, 369 bp, Artificial Sequence
  Description of Artificial Sequence: Synthetic polynucleotide
gaggtgcagctgctggagtctgggggaggcttggtacagcctggggggtcccttcgtctctcctgtacagcctccggattcacctttaatatgtatgagatgtcgtgggtccgccaggctccagggaagggtctagagtgggtctcaggtattagtaggcgtggttttactacatactacgcagactccgtgaagggccggttcaccatctcccgcgacaattccaagaacacgctgtatctgcaaatgaacagcctgcgtgccgaggataccgcggtatattactgtgcgaaagagccgattacgtatgatatgaggtatgcgcgttttgactacagtggtcagggaaccctggtcaccgtctcgagc

SEQ ID NO: 911 - DNA, 369 bp, Artificial Sequence
  Description of Artificial Sequence: Synthetic polynucleotide
gaggtgcagctgttggagtctggaggaggcttggtacagcctggggggtccctgcgtctctcctgtacagcctccggattcacctttaatatgtatgagatgtcgtgggtccgcaaggctccagggaagggtctagagtgggtctcaggtattagtaggcatggttttactacatactacgcagactccgtgaagggccggttcaccatctcccgcgacaattccaagaacacgctgtatctgcaaatgaacagcctgcgtgccgaggataccgcggtatattactgtgcgaaagagccgattacgtatgatatgaggtatgcgcgttttgactactggggtcagggaaccctggtcaccgtctcgagc

SEQ ID NO: 912 - DNA, 369 bp, Artificial Sequence
  Description of Artificial Sequence: Synthetic polynucleotide
gaggtgcagctgttcgagtctgggggaggcttggtacagcctggggggtccctgcgtctctcctgtacagcctccggattcacctttaatatgtatgagatgtcgtgggtccgccaggctccagggaagggtctagagtgggtctcaggtattagtaggcgtggttttactacatactacgcagactccgtgaagggccggttcaccatctcccgcgacaattccaagaacacgctgtatctgcaaatgaacagcctgcgtgccgaggataccgcggtatattactgtgcgaaggagccgattacgtatgatatgaggtatgcgcgttttgactactggggtcggggaaccctggtcaccgtctcgagc

SEQ ID NO: 913 - DNA, 369 bp, Artificial Sequence
  Description of Artificial Sequence: Synthetic polynucleotide
gaggtgcagctgttggagtctgggggaggcttggtacagcctgggggatccctgcgtctctcctgtacagcctccggtttcacctttaatatgtatgagatgtcgtgggtccgccaggctccagggaagggtctagagtgggtctcaggtattagtaggcgtggttttactacatactacgcagactccgtgaagggccggttcaccatctcccgcgacaattccaagaacacgctgtatctgcaaatgaacagcctgcgtgccgaggataccgcggtatattactgtgcgaaagagccgattacgtatgatatgaggtatgcgcgttttgactactggggtcggggaaccctggtcaccgtctcgagc

SEQ ID NO: 914 - DNA, 369 bp, Artificial Sequence
  Description of Artificial Sequence: Synthetic polynucleotide
gaggtgcagctgttggagtctgggggaggctcggtacagcctggggggtccctgcgtctctcctgtacagcctccggattctcctttaatatgtatgagatgtcgtgggtccgccaggctccagggaagggtctagagtgggtctcaggtattagtaggcgtggttttactacatactacgcagactccgtgaagggccggttcaccatctcccgcgacaattccaagaacacgctgtatctgcaaatgaacagcctgcgtgccgaggataccgcggtatattactgtgcgaaagagccgattacgtatgatatgaggtatgcgcgttttgactactggggtcagggaaccctggtcaccgtctcgggc

SEQ ID NO: 915 - DNA, 369 bp, Artificial Sequence
  Description of Artificial Sequence: Synthetic polynucleotide
gaggtgcagctgttggagtctgggggaggcttggtacaacctggggggtccctgcgtctctcctgtacagcctccggattcacctttaatatgtatgagatgtcgtgggtccgcaaggctccagggaagggtctagagtgggtctcaggtattagtaggcgtggttttactacatactacgcagactccgtgaagggccggttcaccatctcccgtgacaattccaagaacacgctgtatctgcaaatgaacagcctgcgtgccgaggataccgcggtatattactgtgcgaaagagccgattacgtatgatatgaggtatgcgcgttttgactactggggtcagggaaccctggtcaccgtctcgagc

SEQ ID NO: 916 - DNA, 348 bp, Artificial Sequence
  Description of Artificial Sequence: Synthetic polynucleotide
gaggtgcagctgttggagtctgggggaggcttggtacagcctggggggtccctgcgtctctcctgtgcagcctccggattcacctttcgggattatgagatgtggtgggtccgccaggctccagggaagggtctagagcgggtctcagctattaatccgcagggtacgcgtacatactacgcagactccgtgaagggccggttcaccatctcccgcgacaattccaagaacacgctgtatctgcaaatgaacagcctgcgtgccgaggataccgcggtatattactgtgcgaaacttccgtttacttttgaggactggggtcagggaaccctggtcaccgtctcgagc

SEQ ID NO: 917 - DNA, 348 bp, Artificial Sequence
  Description of Artificial Sequence: Synthetic polynucleotide
gaggtgcagctgttggagtctgggggaggcttggtacagcctggggggtccctgcgtctctcctgtgcagcctccggattcacctttcgggattatgagatgtggtgggtccgccaggctccagggaagggtctagagcgggtctcagctattaatccgcagggtacgcgtacatactacgcagactccgtgaagggccggttcaccatctcccgcgacaattccaagaacacgctgtatctgcaaatgaacagcctgcgtgccgaggataccgcggtatattactgtgcgaaacttccgtttacttttgacgactggggtcagggaaccctggtcaccgtctcgagc

SEQ ID NO: 918 - DNA, 348 bp, Artificial Sequence
  Description of Artificial Sequence: Synthetic polynucleotide
gaggtgcagctgttggagtctgggggaggcttggtacagcctggggggtccctgcgtctctcctgtgcagcctccggattcacctttcgggattatgagatgtggtgggtccgccaggctccagggaagggtctagagcgggtctcagctattaatccgcagggtacgcgtacatactacgcagactccgtgaagggccggttcaccatctcccgcgacaattccaagaacacgctgtatctgcaaatgaacagcctgcgtgcagaggataccgcggtatattactgtacgaaacttccgtttatttttgaatactggggtcagggaaccctggtcaccgtctcgagc

SEQ ID NO: 919 - DNA, 348 bp, Artificial Sequence
  Description of Artificial Sequence: Synthetic polynucleotide
gaggtgcagctgttggagtccgggggaggcttggtacagcctggggggtccctgcgtctctcctgtgcagcctccggattcacctttcgggattatgagatgtggtgggtccgccaggctccagggaagggtctagagcgggtctcagctattaatccgcagggtacgcgtacatactacgcagactccgtgaagggccggttcaccatctcccgcgacaattccaagaacacgctgtatctgcaaatgaacagcctgcgtgccgaggataccgcggtatattactgtgcgaaacttccgtttatgtttgacgaccggggtcagggaaccctggtcaccgtctcgagc

SEQ ID NO: 920 - DNA, 348 bp, Artificial Sequence
  Description of Artificial Sequence: Synthetic polynucleotide
gaggtgcagctgttggagtctgggggaggcttggtacagcctggggggtccctgcgtctctcctgtgcagcctccggattcacctttcgggattatgagatgtggtgggtccgccaggctccagggaagggtctagagcgggtctcagctattaatccgcagggtacgcgtacatactacgcagactccgtgatgggccggttcaccatctcccgcgacaattccaagaacacgctgtatctgcaaatgaacagcctgcgtgccgaggataccgcggtatattactgtgcgaaacttccgtttacttttgacgactggggtcagggaaccctggtcaccgtctcgagc

SEQ ID NO: 921 - DNA, 348 bp, Artificial Sequence
  Description of Artificial Sequence: Synthetic polynucleotide
gaggtgcagctgttggagtctgggggaggcttggtacagcctggggggtccctgcgtctctcctgtgcagcctccggattctcctttcgggattatgagatgtggtggtaccgccaggctccagggaagggtctagagcgggtctcagctattaatccgcagggtacgcgtacatattacgcagactccgtgaagggccggttcaccatctcccgcgacaattccaagaacacgctgtatctgcaaatgaacagcctgcgtgccgaggataccgcggtatattactgtgcgaaacttccgtttatttttgacaaccggggtcagggaaccctggtcaccgtctcgagc

SEQ ID NO: 922 - DNA, 348 bp, Artificial Sequence
  Description of Artificial Sequence: Synthetic polynucleotide
gaggtgcagctgttggagtctgggggaggcttggtacagcctggggggtccctgcgtctctcctgtgcagcctccggattcacctttcgggattatgagatgtggtgggtccgccaggctccagggaagggtctagagcgggtctcagctattaatccgcagggtacgcgtacatactacgcagactccgtgaagggccggttcaccatctcccgcgacaattccaagaacacgctgtatctgcaaatgaacagcctgcgtgccgaggatacctcggtatatcactgtgcgaaacctccgtttatttttggcgactggggtccgggaaccctggtcaccgtctcgagc

SEQ ID NO: 923 - DNA, 348 bp, Artificial Sequence
  Description of Artificial Sequence: Synthetic polynucleotide
gaggtgcagctgttggagtctgggggaggcttggtacagcctggggggtcccggcgtctctcctgtgcagcctccggattcacctttcgggattatgagatgtggtgggtccgccaggctccggggaagggtctagagcgggtctcagctattaatccgcagggtacgcgtacatactacgcagactccgtgaagggccggttcacgatctcccgcgacaattccaagaacacgctgtatctgcaaatgaacagcctgcgtgccgaggataccgcggtatattactgtgcgaaacttccgtttacttttgaggactggggtcagggaaccctggtcaccgtctcgagc

SEQ ID NO: 924 - DNA, 348 bp, Artificial Sequence
  Description of Artificial Sequence: Synthetic polynucleotide
gaggtgcagctgttggagtctgggggaggcttggtacagcctggggggtccctgcgtctatcctgtgcagcctccggattcacctttcgggattatgagatgtggtgggtccgccaggctccagggaagggtctagagcgggtctcagctattaatccgcagggtacgcgtacatactacgcagactccgtgatgggccggttcaccatctcccgcgacaattccaagaacacgctgtatctgcaaatgaacagcctgcgtgccgaggatactgcggtatattactgtgcgaaacttccgtttatgtttgacgaccggggtcagggaaccctggtcaccgtctcgagc

SEQ ID NO: 925 - DNA, 348 bp, Artificial Sequence
  Description of Artificial Sequence: Synthetic polynucleotide
gaggtgcagctgttggagtctgggggaggcttggtacagcctggggggtccctgcgtctctcctgtgcagcctccggattcacctttcgggattatgagatgtggtgggtccgccaggctccagggaaggttctagagcgggtctcagctattaatccgcagggtacgcgtacatactacgcagactccgtgaagggccggttcaccatctcccgcgacaattccaagaacatgctgtatctgcaaatgaacagcctgcgtgccgaggatactgcggtatattactgtgcgaaacttccgtttatgtttgacgaccggggtcagggaaccctggtcaccgtctcgagc

SEQ ID NO: 926 - DNA, 348 bp, Artificial Sequence
  Description of Artificial Sequence: Synthetic polynucleotide
gaggtgcagctgttggagtctgggggaggcttggtacagcctggggggtccctgcgtctctcctgtgcagcctccggattcacctttcgggattatgagatgtggtgggtccgccaggctccagggaagggtctagagcgggtctcagctattaatccgcagggtacgcgtacatactacgcagactccgtgaagggccggttcaccatctcccgcgacaattccaagaacacgctgtatctgcaaatgaacagcctgcgagccgaggatactgcggtatattactgtgcgaaacttccgtttatgtttgacgaccggggtcagggaaccctggtcaccgtctcgagc

SEQ ID NO: 927 - DNA, 348 bp, Artificial Sequence
  Description of Artificial Sequence: Synthetic polynucleotide
gaggtgcagctgttggagtctgggggaggcttgatacagcctggggggtccctgcgtctctcctgtgcagcctccggattcacctttcgggattatgagatgtggtgggtccgccaggctccagggaagggtctagagcgggtctcagctattaatccgcagggtacgcgtacatactacgcagactccgtgaagggccggttcaccatctcccgcgacaattccaagaacacgctgtatctgcaaatgaacagcctgcgtgccgaggataccgcggtatattactgtttgaaacttccgtttattttcgactactggggtcagggaaccctggtcaccgtctcgagc

SEQ ID NO: 928 - DNA, 348 bp, Artificial Sequence
  Description of Artificial Sequence: Synthetic polynucleotide
gaggtgcagctgttggagtctgggggaggcttggtacagcctggggggtccctgcgtctatcctgtgcagcctccggattcacctttcgggattatgagatgtggtgggtccgccaggctccagggaagggtctagagcgggtctcagctattaacccgcagggtacgcgtacatactatgcagactccgtgaagggccggttcaccatctcccgcgacaattccaagaacacgctgtatctgcaaatgaacagcctgcgtgccgatgataccgcggtatatcactgtacgaaacttccgtttatttttgactactggggtcagggaaccctggtcaccgtctcgagc

SEQ ID NO: 929 - DNA, 348 bp, Artificial Sequence
  Description of Artificial Sequence: Synthetic polynucleotide
gaggtgcagctgttggagtctgggggaggcttggtacagcctggggggtccctgcgtctctcctgtgcagcctccggattcacctttcgggattatgagatgtggtgggtccgccaggctccagggatggttctagagcgggtctcagctattaatccgcagggtacgcgtacatactacgcagactccgtgaagggccggttcaccatctcccgcgacaattccaagaacacgctatatctgcaaatgaacagcctgcgtgccgaggataccgcggtatattactgtgcgaaacttccgtttttttttgactccaggggtcagggaaccctggtcaccgtctcgagc

SEQ ID NO: 930 - DNA, 348 bp, Artificial Sequence
  Description of Artificial Sequence: Synthetic polynucleotide
gaggtgcagctgttggagtctgggggaggcttggtacagcctggggggtccctgcgtctctcctgtgcagcctccggattcacctttcgggattatgagatgtggtgggtccgccgggctccagggaagggtctagagcgggtctcagctattaatccgcagggtacgcgtacatactacgcagactctgtgaagggccggttcaccatctcccgcgacaattccaagaacacgctgtatctgcaaatgaacagcctgcgtgccgaggataccgcggtatattactgtgcgaaacttccgtttacttttgaggactggggtcagggaaccctggtcaccgtctcgagc

SEQ ID NO: 931 - DNA, 348 bp, Artificial Sequence
  Description of Artificial Sequence: Synthetic polynucleotide
gaggtgcagctgttggagtctgggggaggcttggtacagcctggggggtccctgcgtctctcctgtgcagcctccggattcacctttcgggattatgagatgtggtgggtccgccaggctccagggaagggtctagagcgggtctcagctattaatccgcagggtacgcgtacatactacgcagactccgtgatgggccggttcaccatctcccgcgacaattccaagaacacgctgtatctgcaaatgaacagcctgcgtgccgaggacaccgcggtatattactgtgcgaaacttccgtttacttttgaggactggggtcagggaaccctggtcaccgtctcgagc

SEQ ID NO: 932 - DNA, 348 bp, Artificial Sequence
  Description of Artificial Sequence: Synthetic polynucleotide
gaggtgcagctgttggagtctgggggaggcttggtacagcctggggggtccctgcgtctctcctgtgcagcctccggattctcctttcgggattatgagatgtggtggtaccgccaggctccagggaagggtctagagcgggtctcagctattaatccgcagggtacgcgtacatattacgcagactccgtgaagggccggttcaccatctcccgcgacaattccaagaacacgctgtatctgcaaatgaacagcctgcgtgccgaggacaccgcggtatattactgtgcgaaacttccgtttacttttgaggactggggtcagggaaccctggtcaccgtctcgagc

SEQ ID NO: 933 - DNA, 348 bp, Artificial Sequence
  Description of Artificial Sequence: Synthetic polynucleotide
gaggtgcagctgttggagtctgggggaggcttggtacagcctggggggtccctgcgtctctcctgtgcagcctccggattcacctttcgggattatgagatgtggtgggtccgccaggctccagggaaggttctagagcgggtctcagctattaatccgcagggtacgcgtacatactacgcagactccgtgaagggccggttcaccatctcccgcgacaattccaagaacatgctgtatctgcaaatgaacagcctgcgtgccgaggacaccgcggtatattactgtgcgaaacttccgtttacttttgaggactggggtcagggaaccctggtcaccgtctcgagc

SEQ ID NO: 934 - DNA, 348 bp, Artificial Sequence
  Description of Artificial Sequence: Synthetic polynucleotide
gaggtgcagctgttggagtctgggggaggcttggtacagcctggggggtccctgcgtctctcctgtgcagcctccggattcacctttcgggattatgagatgtggtgggtccgccaggctccagggaagggtctagagcgggtctcagctattaatccgcagggtacgcgtacatactacgcagactccgtgaagggccggttcaccatctcccgcgacaattccaagaacacgctgtatctgcaaatgaacagcctgcgtgccgaggataccgcggtatatcactgtgcgaaacttccgtttacttttgaggactggggtcagggaaccctggtcaccgtctcgagc

SEQ ID NO: 935 - DNA, 348 bp, Artificial Sequence
  Description of Artificial Sequence: Synthetic polynucleotide
gaggtgcagctgttggagtctgggggaggcttggtacagcctggggggtccctgcgtctctcctgtgcagcctccggattcacctttcgggattatgagatgtggtgggtccgccaggctccagggaagggtctagagcgggtctcagctattaatccgcagggtacgcgtacatactacgcagactccgtgaagggccggttcaccatctcccgcgacaattccaagaacacgctgtatctgcaaatgaacagcctgcgtgccgaggataccgcggtatattactgtacgaaacttccgtttacttttgaggactggggtcagggaaccctggtcaccgtctcgagc

SEQ ID NO: 936 - DNA, 348 bp, Artificial Sequence
  Description of Artificial Sequence: Synthetic polynucleotide
gaggtgcagctgttggagtctgggggaggcttggtacagcctggggggtccctgcgtctctcctgtgcagcctccggattcacctttcgggattatgagatgtggtgggtccgccaggctccagggaagggtctagagcgggtctcagctattaatccgcagggtacgcgtacatactacgcagactccgtgaagggccggttcaccatctcccgcgacaattccaagaacacgctgtatctgcaaatgaacagcctgcgtgccgaggataccgcggtatattactgtttgaaacttccgtttacttttgaggactggggtcagggaaccctggtcaccgtctcgagc

SEQ ID NO: 937 - DNA, 348 bp, Artificial Sequence
  Description of Artificial Sequence: Synthetic polynucleotide
gaggtgcagctgttggagtctgggggaggcttggtacagcctggggggtccctgcgtctatcctgtgcagcctccggattcacctttcgggattatgagatgtggtgggtccgccaggctccagggaagggtctagagcgggtctcagctattaacccgcagggtacgcgtacatactatgcagactccgtgaagggccggttcaccatctcccgcgacaattccaagaacacgctgtatctgcaaatgaacagcctgcgtgccgatgataccgcggtatatcactgtacgaaacttccgtttatttttgaatactggggtcagggaaccctggtcaccgtctcgagc

SEQ ID NO: 938 - DNA, 348 bp, Artificial Sequence
  Description of Artificial Sequence: Synthetic polynucleotide
gaggtgcagctgttggagtctgggggaggcttggtacagcctggggggtccctgcgtctctcctgtgcagcctccggattcacctttcgggattatgagatgtggtgggtccgccaggctccagggaagggtctagagcgggtctcagctattaatccgcagggtacgcgtacatactacgcagactccgtgatgggccggttcaccatctcccgcgacaattccaagaacacgctgtatctgcaaatgaacagcctgcgtgccgaggacaccgcggtatattactgtgcgaaagaaccttatagttttgactcctggggtcagggaaccctggtcaccgtctcgagc

SEQ ID NO: 939 - DNA, 348 bp, Artificial Sequence
  Description of Artificial Sequence: Synthetic polynucleotide
gaggtgcagctgttggagtctgggggaggcttggtacagcctggggggtccctgcgtctctcctgtgcagcctccggattcacctttcgggattatgagatgtggtgggtccgccaggctccagggaagggtctagagcgggtctcagctattaatccgcagggtacgcgtacatactacgcagactccgtgatgggccggttcaccatctcccgcgacaattccaagaacacgctgtatctgcaaatgaacagcctgcgtgccgaggataccgcggtatatcactgtgcgaaagaaccttatagttatgactactggggtcagggaaccctggtcaccgtctcgagc

SEQ ID NO: 940 - DNA, 348 bp, Artificial Sequence
  Description of Artificial Sequence: Synthetic polynucleotide
gaggtgcagctgttggagtctgggggaggcttggtacagcctggggggtccctgcgtctctcctgtgcagcctccggattcacctttcgggattatgagatgtggtgggtccgccgggctccagggaagggtctagagcgggtctcagctattaatccgcagggtacgcgtacatactacgcagactccgtgatgggccggttcaccatctcccgcgacaattccaagaacacgctgtatctgcaaatgaacagcctgcgtgccgaggataccgcggtatattactgtgcgaaacttccgtttacttttgacgactggggtcagggaaccctggtcaccgtctcgagc

SEQ ID NO: 941 - DNA, 348 bp, Artificial Sequence
  Description of Artificial Sequence: Synthetic polynucleotide
gaggtgcagctgttggagtctgggggaggcttggtacagcctggggggtccctgcgtctatcctgtgcagcctccggattcacctttcgggattatgagatgtggtgggtccgccgggctccagggaagggtctagagcgggtctcagctattaatccgcagggtacgcgtacatactacgcagactccgtgatgggccggttcaccatctcccgcgacaattccaagaacacgctgtatctgcaaatgaacagcctgcgtgccgaggatactgcggtatattactgtgcgaaacttccgtttatgtttgacgaccggggtcagggaaccctggtcaccgtctcgagc

SEQ ID NO: 942 - DNA, 348 bp, Artificial Sequence
  Description of Artificial Sequence: Synthetic polynucleotide
gaggtgcagctgttggagtctgggggaggcttggtacagcctggggggtccctgcgtctatcctgtgcagcctccggattcacctttcgggattatgagatgtggtgggtccgccaggctccagggaagggtctagagcgggtctcagctattaatccgcagggtacgcgtacatactacgcagactccgtgatgggccggttcaccatctcccgcgacaattccaagaacacgctgtatctgcaaatgaacagcctgcgtgccgaggatactgcggtatattactgtgcgaaacttccgtttatgtttgacgactggggtcagggaaccctggtcaccgtctcgagc

SEQ ID NO: 943 - DNA, 348 bp, Artificial Sequence
  Description of Artificial Sequence: Synthetic polynucleotide
gaggtgcagctgttggagtctgggggaggcttggtacagcctggggggtccctgcgtctctcctgtgcagcctccggattcacctttgctgggtatgagttgtggtgggtccgccaggctccagggaagggtctagagcgggtctcagctattaatccgcagggtacgcgtacatactacgcagactccgtgatgggccggttcaccatctcccgcgacaattccaagaacacgctgtatctgcaaatgaacagcctgcgtgccgaggataccgcggtatattactgtgcgaaacttccgtttacttttgacgactggggtcagggaaccctggtcaccgtctcgagc

SEQ ID NO: 944 - DNA, 348 bp, Artificial Sequence
  Description of Artificial Sequence: Synthetic polynucleotide
gaggtgcagctgttggagtctgggggaggcttggtacagcctggggggtccctgcgtctctcctgtgcagcctccggattcacctttgctgggtatgagttgtggtgggtccgccaggctccagggaagggtctagagcgggtctcagctattaatccgcagggtacgcgtacatactacgcagactccgtgatgggccggttcaccatctcccgcgacaattccaagaacacgctgtatctgcaaatgaacagcctgcgtgccgaggatactgcggtatattactgtgcgaaacttccgtttatgtttgacgaccggggtcagggaaccctggtcaccgtctcgagc

SEQ ID NO: 945 - DNA, 348 bp, Artificial Sequence
  Description of Artificial Sequence: Synthetic polynucleotide
gaggtgcagctgttggagtctgggggaggcttggtacagcctggggggtccctgcgtctctcctgtgcagcctccggattcacctttgctgggtatgagatgtggtggttccgccaggctccagggaagggtctagagcgggtctcagctattaatccgcagggtacgcgtacatactacgcagactccgtgatgggccggttcaccatctcccgcgacaattccaagaacacgctgtatctgcaaatgaacagcctgcgtgccgaggataccgcggtatattactgtgcgaaacttccgtttacttttgacgactggggtcagggaaccctggtcaccgtctcgagc

SEQ ID NO: 946 - DNA, 348 bp, Artificial Sequence
  Description of Artificial Sequence: Synthetic polynucleotide
gaggtgcagctgttggagtctgggggaggcttggtacagcctggggggtccctgcgtctctcctgtgcagcctccggattcacctttgctgggtatgagatgtggtggttccgccaggctccagggaagggtctagagcgggtctcagctattaatccgcagggtacgcgtacatactacgcagactccgtgatgggccggttcaccatctcccgcgacaattccaagaacacgctgtatctgcaaatgaacagcctgcgtgccgaggatactgcggtatattactgtgcgaaacttccgtttatgtttgacgaccggggtcagggaaccctggtcaccgtctcgagc

SEQ ID NO: 947 - DNA, 348 bp, Artificial Sequence
  Description of Artificial Sequence: Synthetic polynucleotide
gaggtgcagctgttggagtctgggggaggcttggtacagcctggggggtccctgcgtctctcctgtgcagcctccggattcacctttcgggattatgagatgtggtgggtccgccaggctccagggaagggtctagagtgggtctcagctattaatccgcagggtacgcgtacatactacgcagactccgtgatgggccggttcaccatctcccgcgacaattccaagaacacgctgtatctgcaaatgaacagcctgcgtgccgaggataccgcggtatattactgtgcgaaacttccgtttacttttgacgactggggtcagggaaccctggtcaccgtctcgagc

SEQ ID NO: 948 - DNA, 348 bp, Artificial Sequence
  Description of Artificial Sequence: Synthetic polynucleotide
gaggtgcagctgttggagtctgggggaggcttggtacagcctggggggtccctgcgtctatcctgtgcagcctccggattcacctttcgggattatgagatgtggtgggtccgccaggctccagggaagggtctagagtgggtctcagctattaatccgcagggtacgcgtacatactacgcagactccgtgatgggccggttcaccatctcccgcgacaattccaagaacacgctgtatctgcaaatgaacagcctgcgtgccgaggatactgcggtatattactgtgcgaaacttccgtttatgtttgacgaccggggtcagggaaccctggtcaccgtctcgagc

SEQ ID NO: 949 - DNA, 348 bp, Artificial Sequence
  Description of Artificial Sequence: Synthetic polynucleotide
gaggtgcagctgttggagtctgggggaggcttggtacagcctggggggtccctgcgtctctcctgtgcagcctccggattcacctttcgggattatgagatgtggtgggtccgccaggctccagggaagggtctagagcgggtctcagctattaatccgcagggtacgcgtacatactacgcagactccgtgaagggccggttcaccatctcccgcgacaattccaagaacacgctgtatctgcaaatgaacagcctgcgtgccgaggacaccgcggtatattactgtgcgaaacttccgacctacttttccgaccggggtcagggaaccctggtcaccgtctcgagc

SEQ ID NO: 950 - DNA, 348 bp, Artificial Sequence
  Description of Artificial Sequence: Synthetic polynucleotide
gaggtgcagctgttggagtctgggggaggcttggtacagcctggggggtccctgcgtctctcctgtgcagcctccggattcacctttcgggattatgagatgtggtgggtccgccaggctccagggaagggtctagagcgggtctcagctattaatccgcagggtacgcgtacatactacgcagactccgtgaagggccggttcaccatctcccgcgacaattccaagaacacgctgtatctgcaaatgaacagcctgcgtgccgaggacaccgcggtatattactgtgcgaaacttccgtttttctttgaggagtggggtcagggaaccctggtcaccgtctcgagc

SEQ ID NO: 951 - DNA, 348 bp, Artificial Sequence
  Description of Artificial Sequence: Synthetic polynucleotide
gaggtgcagctgttggagtctgggggaggcttggtacagcctggggggtccctgcgtctctcctgtgcagcctccggattcacctttcgggattatgagatgtggtgggtccgccaggctccagggaagggtctagagcgggtctcagctattaatccgcagggtacgcgtacatactacgcagactccgtgaagggccggttcaccatctcccgcgacaattccaagaacacgctgtatctgcaaatgaacagcctgcgtgccgaggacaccgcggtatattactgtgcgaaacttccgacgtactttaaggactggggtcagggaaccctggtcaccgtctcgagc

SEQ ID NO: 952 - DNA, 348 bp, Artificial Sequence
  Description of Artificial Sequence: Synthetic polynucleotide
gaggtgcagctgttggagtctgggggaggcttggtacagcctggggggtccctgcgtctctcctgtgcagcctccggattcacctttcgggattatgagatgtggtgggtccgccaggctccagggaagggtctagagcgggtctcagctattaatccgcagggtacgcgtacatactacgcagactccgtgaagggccggttcaccatctcccgcgacaattccaagaacacgctgtatctgcaaatgaacagcctgcgtgccgaggacaccgcggtatattactgtgcgaaacttccgttttacttttccgagtggggtcagggaaccctggtcaccgtctcgagc

SEQ ID NO: 953 - DNA, 348 bp, Artificial Sequence
  Description of Artificial Sequence: Synthetic polynucleotide
gaggtgcagctgttggagtctgggggaggcttggtacagcctggggggtccctgcgtctctcctgtgcagcctccggattcacctttcgggattatgagatgtggtgggtccgccaggctccagggaagggtctagagcgggtctcagctattaatccgcagggtacgcgtacatactacgcagactccgtgaagggccggttcaccatctcccgcgacaattccaagaacacgctgtatctgcaaatgaacagcctgcgtgccgaggacaccgcggtatatcactgtgcgaaacttccgatgttctttgaggactggggtcagggaaccctggtcaccgtctcgaac

SEQ ID NO: 954 - DNA, 348 bp, Artificial Sequence
  Description of Artificial Sequence: Synthetic polynucleotide
gaggtgcagctgttggagtctgggggaggcttggtacagcctggggggtccctgcgtctctcctgtgcagcctccggattcacctttcgggattatgagatgtggtgggtccgccaggctccagggaagggtctagagcgggtctcagctattaatccgcagggtacgcgtacatactacgcagactccgtgaagggccggttcaccatctcccgcgacaattccaagaacacgctgtatctgcaaatgaacagcctgcgtgccgaggacaccgcggtatattactgtgcgaaacttccgtttccgttttcggagtggggtcagggaaccctggtcaccgtctcgagc

SEQ ID NO: 955 - DNA, 348 bp, Artificial Sequence
  Description of Artificial Sequence: Synthetic polynucleotide
gaggtgcagctgttggagtctgggggaggcttggtacagcctggggggtccctgcgtctctcctgtgcagcctccggattcacctttcgggattatgagatgtggtgggtccgccaggctccagggaagggtctagagcgggtctcagctattaatccgcagggtacgcgtacatactacgcagactccgtgaagggccggttcaccatctcccgcgacaattccaagaacacgctgtatctgcaaatggacagcctgcgtgccgaggacaccgcggtatattactgtgcgaaacttccgttttacttttccgagtggggtcagggaaccctggtcaccgtctcgagc

SEQ ID NO: 956 - DNA, 348 bp, Artificial Sequence
  Description of Artificial Sequence: Synthetic polynucleotide
gaggtgcagctgttggagtctgggggaggcttggtacagcctggggggtccctgcgtctctcctgtgcagcctccggattcacctttcgggattatgagatgtggtgggtccgccaggctccagggaagggtctagagcgggtctcagctattaatccgtacggtaacctcacatactacgcagactccgtgaagggccggttcaccatctcccgcgacaattccaagaacacgctgtatctgcaaatgaacagcctgcgtgccgaggataccgcggtatattactgtgcgaaacttccgtttacttttgaggactggggtcagggaaccctggtcaccgtctcgagc

SEQ ID NO: 957 - DNA, 348 bp, Artificial Sequence
  Description of Artificial Sequence: Synthetic polynucleotide
gaggtgcagctgttggagtctgggggaggcttggtacagcctggggggtccctgcgtctctcctgtgcagcctccggattcacctttcgggattatgagatgtggtgggtccgccaggctccagggaagggtctagagcgggtctcagctattaatccgcccggtaccttgacatactacgcagactccgtgaagggccggttcaccatctcccgcgacaattccaagaacacgctgtatctgcaaatgaacagcctgcgtgccgaggataccgcggtatattactgtgcgaaacttccgtttacttttgaggaccggggtcagggaaccctggtcaccgtctcgagc

SEQ ID NO: 958 - DNA, 348 bp, Artificial Sequence
  Description of Artificial Sequence: Synthetic polynucleotide
gaggtgcagctgttggagtctgggggaggcttggtacagcctggggggtccctgcgtctctcctgtgcagcctccggattcacctttcgggattatgagatgtggtgggtccgccaggctccagggaagggtctagagcgggtctcagctattaatccgtggggtggcttgacatactacgcagactccgtgaagggccggttcaccatctcccgcgacaattccaagaacacgctgtatctgcaaatgaacagcctgcgtgccgaggataccgcggtatattactgtgcgaaacttccgtttacttttgaggactggggtcagggaaccctggtcaccgtctcgagc

SEQ ID NO: 959 - DNA, 348 bp, Artificial Sequence
  Description of Artificial Sequence: Synthetic polynucleotide
gaggtgcagctgttggagtctgggggaggcttggtacagcctggggggtccctgcgtctctcctgtgcagcctccggattcacctttcgggattatgagatgtggtgggtccgccaggctccagggaagggtctagagcgggtctcagctattaatccgatgggtgggttcacatactacgcagactccgtgaagggccggttcaccatctcccgcgacaattccaagaacacgctgtatctgcaaatgaacagcctgcgtgccgaggataccgcggtatattactgtgcgaaacttccgtttacttttgaggactggggtcagggaaccctggtcaccgtctcgagc

SEQ ID NO: 960 - DNA, 348 bp, Artificial Sequence
  Description of Artificial Sequence: Synthetic polynucleotide
gaggtgcagctgttggagtctgggggaggcttggtacagcctggggggtccctgcgtctctcctgtgcagcctccggattcacctttcgggattatgagatgtggtgggtccgccaggctccagggaagggtctagagcgggtctcagctattaatccgtggggttcgcacacatactacgcagactccgtgaagggccggttcaccatctcccgcgacaattccaagaacacgctgtatctgcaaatgaacagcctgcgtgccgaggataccgcggtatattactgtgcgaaacttccgtttacttttgaggactggggtcagggaaccctggtcaccgtctcgagc

SEQ ID NO: 961 - DNA, 348 bp, Artificial Sequence
  Description of Artificial Sequence: Synthetic polynucleotide
gaggtgcagctgttggagtctgggggaggcttggtacagcctggggggtccctgcgtctctcctgtgcagcctccggattcacctttcgggattatgagatgtggtgggtccgccaggctccagggaagggtctagagcgggtctcagctattaatccgtccggtgggctgacatactacgcagactccgtgaagggccggttcaccatctcccgcgacaattccaagaacacgctgtatctgcaaatgaacagcctgcgtgccgaggataccgcggtatattactgtgcgaaacttccgtttacttttgacgaccggggtcagggaaccctggtcaccgtctcgagc

SEQ ID NO: 962 - DNA, 348 bp, Artificial Sequence
  Description of Artificial Sequence: Synthetic polynucleotide
gaggtgcagctgttggagtctgggggaggcttggtacagcctggggggtccctgcgtctctcctgtgcagcctccggattcacctttcgggattatgagatgtggtgggtccgccaggctccagggaagggtctagagcgggtctcagctattaatccgcacggttcgttgacatactacgcagactccgtgaagggccggttcaccatctcccgcgacaattccaagaacacgctgtatctgcaaatgaacagcctgcgtgccgaggataccgcggtatattactgtgcgaaacttccgtttacttttgacgactggggtcagggaaccctggtcaccgtctcgagc

SEQ ID NO: 963 - DNA, 348 bp, Artificial Sequence
  Description of Artificial Sequence: Synthetic polynucleotide
gaggtgcagctgttggagtctgggggaggcttggtacagcctggggggtccctgcgtctctcctgtgcagcctccggattcacctttcgggattatgagatgtggtgggtccgccaggctccagggaagggtctagagcgggtctcagctattaatccggccggtcggttgacatactacgcagactccgtgaagggccggttcaccatctcccgcgacaattccaagaacacgctgtatctgcaaatgaacagcctgcgtgccgaggataccgcggtatattactgtgcgaaacttccgtttacttttgaggactggggtcagggaaccctggtcaccgtctcgagc

SEQ ID NO: 964 - DNA, 348 bp, Artificial Sequence
  Description of Artificial Sequence: Synthetic polynucleotide
gaggtgcagctgttggagtctgggggaggcttggtacagcctggggggtccctgcgtctctcctgtgcagcctccggattcacctttcgggattatgagatgtggtgggtccgccaggctccagggaagggtctagagcgggtctcagctattaatccgtggggtagcttgacatactacgcagactccgtgaagggccggttcaccatctcccgcgacaattccaagaacacgctgtatctgcaaatgaacagcctgcgtgccgaggataccgcggtatattactgtgcgaaacttccgtttacttttgaggactggggtcagggaaccctggtcaccgtctcgagc

SEQ ID NO: 965 - DNA, 348 bp, Artificial Sequence
  Description of Artificial Sequence: Synthetic polynucleotide
gaggtgcagctgttggagtctgggggaggcttggtacagcctggggggtccctgcgtctctcctgtgcagcctccggattcacctttcccgactacgagatgtggtgggtccgccaggctccagggaagggtctagagcgggtctcagctattaatccgcagggtacgcgtacatactacgcagactccgtgaagggccggttcaccatctcccgcgacaattccaagaacacgctgtatctgcaaatgaacagcctgcgtgccgaggataccgcggtatatcactgtgcgaaacttccgtttacttttgacgactggggtcagggaaccctggtcaccgtctcgagc

SEQ ID NO: 966 - DNA, 348 bp, Artificial Sequence
  Description of Artificial Sequence: Synthetic polynucleotide
gaggtgcagctgttggagtctgggggaggcttggtacagcctggggggtccctgcgtctctcctgtgcagactccggattcacctttccgcccgtggagatgtggtgggtccgccaggctccagggaagggtctagagcgggtctcagctattaatccgcagggtacgcgtacatactacgcagactccgtgaagggccggttcaccatctcccgcgacaattccaagaacacgctgtatctgcaaatgaacagcctgcgtgccgaggataccgcggtatattactgtgcgaaacttccgtttacttttgaggactggggtcagggaaccctggtcaccgtctcgagc

SEQ ID NO: 967 - DNA, 348 bp, Artificial Sequence
  Description of Artificial Sequence: Synthetic polynucleotide
gaggtgcagctgttggagtctgggggaggcttggtacagcctggggggtccctgcgtctctcctgtgcagcctccggattcacctttcgggattatgagatgtggtgggtccgccaggctccagggaagggtctagagcgggtctcagctattaatccgtacggtgggctgacatactacgcagactccgtgaagggccggttcaccatctcccgcgacaattccaagaacacgctgtatctgcaaatgaacagcctgcgtgccgaggataccgcggtatattactgtgcgaaacttccgtttacttttgacgactggggtcagggaaccctggtcaccgtctcgagc

SEQ ID NO: 968 - DNA, 348 bp, Artificial Sequence
  Description of Artificial Sequence: Synthetic polynucleotide
gaggtgcagctgttggagtctgggggaggcttggtacagcctggggggtccctgcgtctctcctgtgcagcctccggattcacctttcgggattatgagatgtggtgggtccgccaggctccagggaagggtctagagcgggtctcagctattaatccgtggggtaaccacacatactacgcagactccgtgaagggccggttcaccatctcccgcgacaattccaagaacacgctgtatctgcaaatgaacagcctgcgtgccgaggataccgcggtatattactgtgcgaaacttccgtttacttttgaggactggggtcagggaaccctggtcaccgtctcgagc

SEQ ID NO: 969 - DNA, 348 bp, Artificial Sequence
  Description of Artificial Sequence: Synthetic polynucleotide
gaggtgcagctgttggagtctgggggaggcttggtacagcctggggggtccctgcgtctctcctgtgcagcctccggattcacctttcgggattatgagatgtggtgggtccgccaggctccagggaagggtctagagcgggtctcagctattaatccgcacggtggctacacatactacgcagactccgtgaagggccggttcaccatctcccgcgacaattccaagaacacgctgtatctgcaaatgaacagcctgcgtgccgaggataccgcggtatattactgtgcgaaacttccgtttacttttgaggactggggtcagggaaccctggtcaccgtctcgagc

SEQ ID NO: 970 - DNA, 348 bp, Artificial Sequence
  Description of Artificial Sequence: Synthetic polynucleotide
gaggtgcagctgttggagtctgggggaggcttggtacagcctggggggtccctgcgtctctcctgtgcagcctccggattcacctttcgggattatgagatgtggtgggtccgccaggctccagggaggggtctagagcgggtctcagctattaatccgcccggtatgctcacatactacgcagactccgtgaagggccggttcaccatctcccgcgacaattccaagaacacgctgtatctgcaaatgaacagcctgcgtgccgaggataccgcggtatattactgtgcgaaacttccgtttacttttgacgactggggtcagggaaccctggtcaccgtctcgagc

SEQ ID NO: 971 - DNA, 348 bp, Artificial Sequence
  Description of Artificial Sequence: Synthetic polynucleotide
gaggtgcagctgttggagtctgggggaggcttggtacagcctggggggtccctgcgtctctcctgtgcagcctccggattcacctttcgggattatgagatgtggtgggtccgccaggctccagggaagggtctagagcgggtctcagctattaatccgtggggtcagttgacatactacgcagactccgtgaagggccggttcaccatctcccgcgacaattccaagaacacgctgtatctgcaaatgaacagcctgcgtgccgaggataccgcggtatattactgtgcgaaacttccgtttacttttgaggactggggtcagggaaccctggtcaccgtctcgagc

SEQ ID NO: 972 - DNA, 348 bp, Artificial Sequence
  Description of Artificial Sequence: Synthetic polynucleotide
gaggtgcagctgttggagtctgggggaggcttggtacagcctggggggtccctgcgtctctcctgtgcagcctccggattcacctttcgggattatgagatgtggtgggtccgccaggctccagggaagggtctagagcgggtctcagctattaatccgtggggtggctacacatactacgcagactccgtgaagggccgattcaccatctcccgcgacaattccaagaacacgctgtatctgcaaatgaacagcctgcgtgccgaggataccgcggtatattactgtgcgaaacttccgtttacttttgacgactggggtcagggaaccctggtcaccgtctcgagc

SEQ ID NO: 973 - DNA, 348 bp, Artificial Sequence
  Description of Artificial Sequence: Synthetic polynucleotide
gaggtgcagctgttggagtctgggggaggcttggtacagcctggggggtccctgcgtctctcctgtgcagcctccggattcacctttcgggattatgagatgtggtgggtccgccaggctccagggaagggtctagagcgggtctcagctattaatccgtcgggtgggctgacatactacgcagactccgtgaagggccggttcaccatctcccgcgacaattccaagaacacgctgtatctgcaaatgaacagcctgcgtgccgaggataccgcggtatattactgtgcgaaacttccgtttacttttgaggactggggtcagggaaccctggtcaccgtctcgagc

SEQ ID NO: 974 - DNA, 348 bp, Artificial Sequence
  Description of Artificial Sequence: Synthetic polynucleotide
gaggtgcagctgttggagtctgggggaggcttggtacagcctggggggtccctgcgtctctcctgtgcagcctccggattcacctttcgggattatgagatgtggtgggtccgccaggctccagggaagggtctagagcgggtctcagctattaatccgtcgggtgggttgacatactacgcagactccgtgaagggccggttcaccatctcccgcgacaattccaagaacacgctgtatctgcaaatgaacagcctgcgtgccgaggataccgcggtatattactgtgcgaaacttccgtttacttttgacgactggggtcagggaaccctggtcaccgtctcgagc

SEQ ID NO: 975 - DNA, 348 bp, Artificial Sequence
  Description of Artificial Sequence: Synthetic polynucleotide
gaggtgcagctgttggagtctgggggaggcttggtacagcctggggggtccctgcgtctctcctgtgcagcctccggattcacctttcgggattatgagatgtggtgggtccgccaggctccagggaagggtctagagcgggtctcagctattaatccgtcgggtacgctcacatactacgcagactccgtgaagggccggttcaccatctcccgcgacaattccaagaacacgctgtatctgcaaatgaacagcctgcgtgccgaggataccgcggtatattactgtgcgaaacttccgtttacttttgaggactggggtcagggaaccctggtcaccgtctcgagc

SEQ ID NO: 976 - DNA, 348 bp, Artificial Sequence
  Description of Artificial Sequence: Synthetic polynucleotide
gaggtgcagctgttggagtctgggggaggcttggtacagcctggggggtccctgcgtctctcctgtgcagcctccggattcacctttcgggattatgagatgtggtgggtccgccaggctccagggaagggtctagagcgggtctcagctattaatccgtacggttcgttgacatactacgcagactccgtgaagggccggttcaccatctcccgcgacaattccaagaacacgctgtatctgcaaatgaacagcctgcgtgccgaggataccgcggtatattactgtgcgaaacttccgtttacttttgacgactggggtcagggaaccctggtcaccgtctcgagc

SEQ ID NO: 977 - DNA, 348 bp, Artificial Sequence
  Description of Artificial Sequence: Synthetic polynucleotide
gaggtgcagctgttggagtctgggggaggcttggtacagcctggggggtccctgcgtctctcctgtgcagcctccggattcacctttcgggattatgagatgtggtgggtccgccaggctccagggaagggtctagagcgggtctcagctattaatccgtggggtggctacacatactacgcagactccgtgaagggccggttcaccatctcccgcgacaattccaagaacacgctgtatctgcaaatgaacagcctgcgtgccgaggataccgcggtatattactgtgcgaaacttccgtttacttttgaggactggggtcagggaaccctggtcaccgtctcgagc

SEQ ID NO: 978 - DNA, 348 bp, Artificial Sequence
  Description of Artificial Sequence: Synthetic polynucleotide
gaggtgcagctgttggagtctgggggaggcttggtacagcctggggggtccctgcgtctctcctgtgcagcctccggattcacctttcgggattatgagatgtggtgggtccgccaggctccagggaagggtctagagcgggtctcagctattaatccgcagggtgggctgacatactacgcagactccgtgaagggccggttcaccatctcccgcgacaattccaagaacacgctgtatctgcaaatgaacagcctgcgtgccgaggataccgcggtatattactgtgcgaaacttccgtttacttttgaggactggggtcagggaaccctggtcaccgtctcgagc

SEQ ID NO: 979 - DNA, 348 bp, Artificial Sequence
  Description of Artificial Sequence: Synthetic polynucleotide
gaggtgcagctgttggagtctgggggaggcttggtacagcctggggggtccctgcgtctctcctgtgcagcctccggattcacctttcgggattatgagatgtggtgggtccgccaggctccagggaagggtctagagcgggtctcagctattaatccgtggggttcccacacatactacgcagactccgtgaagggccggttcaccatctcccgcgacaattccaagaacacgctgtatctgcaaatgaacagcctgcgtgccgaggataccgcggtatattactgtgcgaaacttccgtttacttttgacgactggggtcagggaaccctggtcaccgtctcgagc

SEQ ID NO: 980 - DNA, 348 bp, Artificial Sequence
  Description of Artificial Sequence: Synthetic polynucleotide
gaggtgcagctgttggagtctgggggaggcttggtacagcctggggggtccctgcgtctctcctgtgcagcctccggattcacctttcgggattatgagatgtggtgggtccgccaggctccagggaagggtctagagcgggtctcagctattaatccgtggggtaccttgacatactacgcagactccgtgaagggccggttcaccatctcccgcgacaattccaggaacacgctgtatctgcaaatgaacagcctgcgtgccgaggataccgcggtatattactgtgcgaaacttccgtttacttttgacgactggggtcagggaaccctggtcaccgtctcgagc

SEQ ID NO: 981 - DNA, 348 bp, Artificial Sequence
  Description of Artificial Sequence: Synthetic polynucleotide
gaggtgcagctgttggagtctgggggaggcttggtacagcctggggggtccctgcgtctctcctgtgcagcctccggattcacctttcgggattatgagatgtggtgggtccgccaggctccagggaagggtctagagcgggtctcagctattaatccgaacggtcggctgacatactacgcagactccgtgaagggccggttcaccatctcccgcgacaattccaagaacacgctgtatctgcaaatgaacagcctgcgtgccgaggataccgcggtatattactgtgcgaaacttccgtttacttttgcggactggggtcagggaaccctggtcaccgtctcgagc

SEQ ID NO: 982 - DNA, 348 bp, Artificial Sequence
  Description of Artificial Sequence: Synthetic polynucleotide
gaggtgcagctgttggagtctgggggaggcttggtacagcctggggggtccctgcgtctctcctgtgcagcctccggattcacctttcgggattatgagatgtggtgggtccgccaggctccagggaagggtctagagcgggtctcagctattaatccgtggggtcagctgacatactacgcagactccgtgaagggccggttcaccatctcccgcgacaattccaagaacacgctgtatctgcaaatgaacagcctgcgtgccgaggataccgcggtatattactgtgcgaaacttccgtttacttttgacgactggggtcagggaaccctggtcaccgtctcgagc

SEQ ID NO: 983 - DNA, 348 bp, Artificial Sequence
  Description of Artificial Sequence: Synthetic polynucleotide
gaggtgcagctgttggagtctgggggaggcttggtacagcctggggggtccctgcgtctctcctgtgcagcctccggattcacctttcgggattatgagatgtggtgggtccgccaggctccagggaagggtctagagcgggtctcagctattaatccgcacggtggcctcacatactacgcagactccgtgaagggccggttcaccatctcccgcgacaattccaagaacacgctgtatctgcaaatgaacagcctgcgtgccgaggataccgcggtatattactgtgcgaaacttccgtttacttttgacgactggggtcagggaaccctggtcaccgtctcgagc

SEQ ID NO: 984 - DNA, 348 bp, Artificial Sequence
  Description of Artificial Sequence: Synthetic polynucleotide
gaggtgcagctgttggagtctgggggaggcttggtacagcctggggggtccctgcgtctctcctgtgcagcctccggattcacctttcgggattatgagatgtggtgggtccgccaggctccagggaagggtctggagcgggtctcagctattaatccggcgggtatgttgacatactacgcagactccgtgaagggccggttcaccatctcccgcgacaattccaagaacacgctgtatctgcaaatgaacagcctgcgtgccgaggataccgcggtatattactgtgcgaaacttccgtttacttttgacgactggggtcagggaaccctggtcaccgtctcgagc

SEQ ID NO: 985 - DNA, 348 bp, Artificial Sequence
  Description of Artificial Sequence: Synthetic polynucleotide
gaggtgcagctgttggagtctgggggaggcttggtacagcctggggggtccctgcgtctctcctgtgcagcctccggattcacctttcgggattatgagatgtggtgggtccgccaggctccagggaagggtctagagcgggtctcagctattaatccgcacggtaccttgacatactacgcagactccgtgaagggccggttcaccatctcccgcgacaattccaagaacacgctgtatctgcaaatgaacagcctgcgtgccgaggataccgcggtatattactgtgcgaaacttccgtttacttttgaggactggggtcagggaaccctggtcaccgtctcgagc

SEQ ID NO: 986 - DNA, 348 bp, Artificial Sequence
  Description of Artificial Sequence: Synthetic polynucleotide
gaggtgcagctgttggagtctgggggaggcttggtacagcctggggggtccctgcgtctctcctgtgcagcctccggattcacctttcgggattatgagatgtggtgggtccgccaggctccagggaagggtctagagcgggtctcagctattaatccgtggggttcgttgacatactacgcagactccgtgaagggccggttcaccatctcccgcgacaattccaagaacacgctgtatctgcaaatgaacagcctgcgtgccgaggataccgcggtatattactgtgcgaaacttccgtttacttttgacgactggggtcagggaaccctggtcaccgtctcgagc

SEQ ID NO: 987 - DNA, 348 bp, Artificial Sequence
  Description of Artificial Sequence: Synthetic polynucleotide
gaggtgcagctgttggagtctgggggaggcttggtacagcctggggggtccctgcgtctctcctgtgcagcctccggattcacctttcgggattatgagatgtggtgggtccgccaggctccagggaagggtctagagcgggtctcagctattaatccgtacggtggcctgacatactacgcagactccgtgaagggccggttcaccatctcccgcgacaattccaagaacacgctgtatctgcaaatgaacagcctgcgtgccgaggataccgcggtatattactgtgcgaaacttccgtttacttttgaggactggggtcagggaaccctggtcaccgtctcgagc

SEQ ID NO: 988 - DNA, 348 bp, Artificial Sequence
  Description of Artificial Sequence: Synthetic polynucleotide
gaggtgcagctgttggagtctgggggaggcttggtacagcctggggggtccctgcgtctctcctgtgcagcctccggattcacctttcgggattacgagatgtggtgggtccgccaggctccagggaagggtctagagcgggtctcagctattaatccggccggtttcttgacatactacgcagactccgtgaagggccggttcaccatctcccgcgacaattccaagaacacgctgtatctgcaaatgaacagcctgcgtgccgaggataccgcggtatattactgtgcgaaacttccgtttacttttgaggactggggtcagggaaccctggtcaccgtctcgagc

SEQ ID NO: 989 - DNA, 348 bp, Artificial Sequence
  Description of Artificial Sequence: Synthetic polynucleotide
gaggtgcagctgttggagtctgggggaggcttggtacggcctggggggtccctgcgtctctcctgtgcagcctccggattcacctttcgggattatgagatgtggtgggtccgccaggctccagggaagggtctggagcgggtctcagctattaatccgtacggtggcctgacatactacgcagactccgtgaagggccggttcaccatctcccgcgacaattccaagaacacgctgtatctgcaaatgaacagcctgcgtgccgaggataccgcggtatattactgtgcgaaacttccgtttacttttgaggactggggtcagggaaccctggtcaccgtctcgagc

SEQ ID NO: 990 - DNA, 348 bp, Artificial Sequence
  Description of Artificial Sequence: Synthetic polynucleotide
gaggtgcagctgttggagtctgggggaggcttggtacagcctggggggtccctgcgtctctcctgtgcagcctccggattcacctttcgggattatgagatgtggtgggtccgccaggctccagggaagggtctagagcgggtctcagctattaatccgtggggtgggttcacatactacgcagactccgtgaagggccggttcaccatctcccgcgacaattccaagaacacgctgtatctgcaaatgaacagcctgcgtgccgaggataccgcggtatattactgtgcgaaacttccgtttacttttgaggactggggtcagggaaccctggtcaccgtctcgagc

SEQ ID NO: 991 - DNA, 348 bp, Artificial Sequence
  Description of Artificial Sequence: Synthetic polynucleotide
gaggtgcagctgttggagtctgggggaggcttggtacagcctggggggtccctgcgtctctcctgtgcagcctccggattcacctttcgggattatgagatgtggtgggtccgccaggctccagggaagggtctagagcgggtctcagctattaatccgtggggtgggttgacatactacgcagactccgtgaagggccggttcaccatctcccgcgacaattccaagaacacgctgtatctgcaaatgaacagcctgcgtgccgaggataccgcggtatattactgtgcgaaacttccgtttacttttgacgactggggtcagggaaccctggtcaccgtctcgagc

SEQ ID NO: 992 - DNA, 348 bp, Artificial Sequence
  Description of Artificial Sequence: Synthetic polynucleotide
gaggtgcagctgttggagtctgggggaggcttggtacagcctggggggtccctgcgtctctcctgtgcagcctccggattcacctttcgggattatgagatgtggtgggtccgccaggctccagggaagggtctagagcgggtctcagctattaatccgtacggtgggctgacatactacgcagactccgtgaagggccggttcaccatctcccgcgacaattccaagaacacgctgtatctgcaaatggacagcctgcgtgccgaggataccgcggtatattactgtgcgaaacttccgtttacttttgaggactggggtcagggaaccctggtcaccgtctcgagc

SEQ ID NO: 993 - DNA, 348 bp, Artificial Sequence
  Description of Artificial Sequence: Synthetic polynucleotide
gaggtgcagctgttggagtctgggggaggcttggtacagcctggggggtccctgcgtctctcctgtgcagcctccggattcacctttcgggattatgagatgtggtgggtccgccaggctccagggaagggtctagagcgggtctcagctattaatccgtggggtacgttgacatactacgcagactccgtgaagggccggttcaccatctcccgcgacaattccaagaacacgctgtatctgcaaatgaacagcctgcgtgccgaggataccgcggtatattactgtgcgaaacttccgtttacttttgaggactggggtcagggaaccctggtcaccgtctcgagc

SEQ ID NO: 994 - DNA, 348 bp, Artificial Sequence
  Description of Artificial Sequence: Synthetic polynucleotide
gaggtgcagctgttggagtctgggggaggcttggtacagcctggggggtccctgcgtctctcctgtgcagcctccggattcacctttcgggattatgagatgtggtgggtccgccaggctccagggaagggtctagagcgggtctcagctattaatccgtggggtggctacacatactacgcagactccgtgaagggccggttcaccatctcccgcgacaattccaagaacacgctgtatctgcaaatgaacagcctgcgtgccgaggataccgcggtatattactgtgcgaaacttccgtttacttttgaggactggggtcggggaaccctggtcaccgtctcgagc

SEQ ID NO: 995 - DNA, 348 bp, Artificial Sequence
  Description of Artificial Sequence: Synthetic polynucleotide
gaggtgcagctgttggagtctgggggaggcttggtacagcctggggggtccctgcgtctctcctgtgcagcctccggattcacctttcgggattatgagatgtggtgggtccgccaggctccagggaagggtctagagcgggtctcagctattaatccgtacggtaacctgacatactacgcagactccgtgaagggccggttcaccatctcccgcgacaattccaagaacacgctgtatctgcaaatgaacagcctgcgtgccgaggataccgcggtatattactgtgcgaaacttccgtttacttttgacgactggggtcagggaaccctggtcaccgtctcgagc

SEQ ID NO: 996 - DNA, 348 bp, Artificial Sequence
  Description of Artificial Sequence: Synthetic polynucleotide
gaggtgcagctgttggagtctgggggaggcttggtacagcctggggggtccctgcgtctctcctgtgcagcctccggattcacctttcgggattatgagatgtggtgggtccgccaggctccagggaagggtctagagcgggtctcagctattaatccgcacggtgggttcacatactacgcagactccgtgaagggccggttcaccatctcccgcgacaattccaagaacacgctgtatctgcaaatgaacagcctgcgtgccgaggataccgcggtatattactgtgcgaaacttccgtttacttttgaggactggggtcagggaaccctggtcaccgtctcgagc

SEQ ID NO: 997 - DNA, 348 bp, Artificial Sequence
  Description of Artificial Sequence: Synthetic polynucleotide
gaggtgcagctgttggagtctgggggaggcttggtacagcctggggggtccctgcgtctctcctgtgcagcctccggattcacctttcgggattatgagatgtggtgggtccgccaggctccagggaagggtctagagcgggtctcagctattaatccggccggtttctacacatactacgcagactccgtgaagggccggttcaccatctcccgcgacaattccaagaacacgctgtatctgcaaatgaacagcctgcgtgccgaggataccgcggtatattactgtgcgaaacttccgtttacttttgacgactggggtcagggaaccctggtcaccgtctcgagc

SEQ ID NO: 998 - DNA, 348 bp, Artificial Sequence
  Description of Artificial Sequence: Synthetic polynucleotide
gaggtgcagctgttggagtctgggggaggcttggtacagcctggggggtccctgcgtctctcctgtgcagcctccggattcacctttcgggattatgagatgtggtgggtccgccaggctccagggaagggtctagagcgggtctcagctattaatccggcgggtggcctcacatactacgcagactccgtgaagggccggttcaccatctcccgcgacaattccaagaacacgctgtatctgcaaatgaacagcctgcgtgccgaggataccgcggtatattactgtgcgaaacttccgtttacttttgacgactggggtcagggaaccctggtcaccgtctcgagc

SEQ ID NO: 999 - DNA, 348 bp, Artificial Sequence
  Description of Artificial Sequence: Synthetic polynucleotide
gaggtgcagctgttggagtctgggggaggcttggtacagcctggggggtccctgcgtctctcctgtgcagcctccggattcgcctttcgggattatgagatgtggtgggtccgccaggctccagggaagggtctagagcgggtctcagctattaatccgcacggttccctcacatactacgcagactccgtgaagggccggttcaccatctcccgcgacaattccaagaacacgctgtatctgcaaatgaacagcctgcgtgccgaggataccgcggtatattactgtgcgaaacttccgtttacttttgaggactggggtcagggaaccctggtcaccgtctcgagc

SEQ ID NO: 1000 - DNA, 348 bp, Artificial Sequence
  Description of Artificial Sequence: Synthetic polynucleotide
gaggtgcagctgttggagtctgggggaggcttggtacagcctggggggtccctgcgtctctcctgtgcagcctccggattcacctttcgtgattatgagatgtggtgggtccgccaggctccagggaagggtctagagcgggtctcagctattaatccggccggtgggtacacatactacgcagactccgtgaagggccggttcaccatctcccgcgacaattccaagaacacgctgtatctgcaaatgaacagcctgcgtgccgaggataccgcggtatatcactgtgcgaaacttccgtttacttttgaggactggggtcagggaaccctggtcaccgtctcgagc

SEQ ID NO: 1001 - DNA, 348 bp, Artificial Sequence
  Description of Artificial Sequence: Synthetic polynucleotide
gaggtgcagctgttggagtctgggggaggcttggtacagcctggggggtccctgcgtctctcctgtgcagcctccggattcacctttcgggattatgagatgtggtgggtccgccaggctccagggaagggtctagagcgggtctcagctattaatccgcagggtacgcgtacatactacgcagactccgtgaagggccggttcaccatctcccgcgacaattccaagaacacgctgtatctgcaaatgaacagcctgcgtgccgaggacaccgcggtatattactgtgcgaaacttccgttttggtttacggagtggggtcagggaaccctggtcaccgtctcgagc

SEQ ID NO: 1002 - DNA, 348 bp, Artificial Sequence
  Description of Artificial Sequence: Synthetic polynucleotide
gaggtgcagctgttggagtctgggggaggcttggtacagcctggggggtccctgcgtctctcctgtgcagcctccggattcacctttcgggattatgagatgtggtgggtccgccaggctccagggaagggtctagagcgggtctcagctattaatccgcagggtacgcgtacatactacgcagactccgtgaagggccggttcaccatctcccgcgacaattccaagaacacgctgtatctgcaaatgaacagcctgcgtgccgaggataccgcggtatattactgtgcgaaacttccgttcatgttttccgaccggggtcagggaaccctggtcaccgtctcgagc

SEQ ID NO: 1003 - DNA, 348 bp, Artificial Sequence
  Description of Artificial Sequence: Synthetic polynucleotide
gaggtgcagctgttggagtctgggggaggcttggtacagcctggggggtccctgcgtctctcctgtgcagcctccggattcacctttcgggattatgagatgtggtgggtccgccaggctccagggaagggtctagagcgggtctcagctattaatccgcagggtacgcgtacatactacgcagactccgtgaagggccggttcaccatctcccgcgacaattccaagaacacgctgtatctgcaaatgaacagcctgcgtgccgaggacaccgcggtatattactgtgcgaaacttccgtttttgtttcaggagtggggtcagggaaccctggtcaccgtctcgagc

SEQ ID NO: 1004 - DNA, 348 bp, Artificial Sequence
  Description of Artificial Sequence: Synthetic polynucleotide
gaggtgcagctgttggagtctgggggaggcttggtacagcctggggggtccctgcgtctctcctgtgcagcctccggattcacctttcgggattatgagatgtggtgggtccgccaggctccagggaagggtctagagcgggtctcagctattaatccgcagggtacgcgtacatactacgcagactccgtgaagggccggttcaccatctcccgcgacaattccaagaacacgctgtatctgcaaatgaacagcctgcgtgccgaggacaccgcggtatattactgtgcgaaacttccgacgcggtttgaggactggggtcagggaaccctggtcaccgtctcgagc

SEQ ID NO: 1005 - DNA, 348 bp, Artificial Sequence; identical to SEQ ID NO: 609
  Description of Artificial Sequence: Synthetic polynucleotide

SEQ ID NO: 1006 - DNA, 348 bp, Artificial Sequence
  Description of Artificial Sequence: Synthetic polynucleotide
gaggtgcagctgttggagtctgggggaggcttggtacagcctggggggtccctgcgtctctcctgtgcagcctccggattcacctttcgggattatgagatgtggtgggtccgccaggctccagggaagggtctagagcgggtctcagctattaatccgcagggtacgcgtacatactacgcagactccgtgaagggccggttcaccatctcccgcgacaattccaagaacacgctgtatctgcaaatgaacagcctgcgtgccgaggataccgcggtatattactgtgggaaagagccgtttcgttatgactactggggtcagggaaccctggtcaccgtctcgagc

SEQ ID NO: 1007 - DNA, 348 bp, Artificial Sequence
  Description of Artificial Sequence: Synthetic polynucleotide
gaggtgcagctgttggagtctgggggaggcttggtacagcctggggggtccctgcgtctctcctgtgcagcctccggattcacctttcgggattatgagatgtggtgggtccgccaggctccagggaagggtctagagcgggtctcagctattaatccgcagggtacgcgtacatactacgcagactccgtgaagggccggttcaccatctcccgcgacaattccaagaacacgctgtatctgcaaatgaacagcctgcgtgccgaggacaccgcggtatattactgtgcgaaacttccgacgttctttaaggactggggtcagggaaccctggtcaccgtctcgagc

SEQ ID NO: 1008 - DNA, 348 bp, Artificial Sequence
  Description of Artificial Sequence: Synthetic polynucleotide
gaggtgcagctgttggagtctgggggaggcttggtacagcctggggggtccctgcgtctctcctgtgcagcctccggattcacctttcgggattatgagatgtggtgggtccgccaggctccagggaagggtctagagcgggtctcagctattaatccgcagggtacacgtacatactacgcagactccgtgaagggccggttcaccatctcccgcgacaattccaagaacacgctgtatctgcaaatgaacagcctgcgtgccgaggataccgcggtatattactgtgcgaaacttccgtttttctttcaggagtggggtcagggaaccctggtcaccgtctcgagc

SEQ ID NO: 1009 - DNA, 348 bp, Artificial Sequence
  Description of Artificial Sequence: Synthetic polynucleotide
gaggtgcagctgttggagtctgggggaggcttggtacagcctggggggtccctgcgtctctcctgtgcagcctccggattcacctttcgggattatgagatgtggtgggtccgccaggctccagggaagggtctagagcgggtctcagctattaatccgcagggtacgcgtacatactacgcagactccgtgaagggccggttcaccatctcccgcgacaattccaagaacacgctgtatctgcaaatgaacagcctgcgtgccgaggacaccgcggtatattactgtgcgaaacttccgcagttgtttcacgaccggggtcagggaaccctggtcaccgtctcgagc

SEQ ID NO: 1010 - DNA, 348 bp, Artificial Sequence
  Description of Artificial Sequence: Synthetic polynucleotide
gaggtgcagctgttggagtctgggggaggcttggtacagcctggggggtccctgcgtctctcctgtgcagcctccggattcacctttcgggattatgagatgtggtgggtccgccaggctccagggaagggtctagagcgggtctcagctattaatccgcagggtacgcgtacatactacgcagactccgtgaagggccggttcaccatctcccgcgacaattccaagaacacgctgtatctgcaaatgaacagcctgcgtgccgaggacaccgcggtatattactgtgcgaaacttccgcagctctttgaggactggggtcagggaaccctggtcaccgtctcgagc

SEQ ID NO: 1011 - DNA, 348 bp, Artificial Sequence
  Description of Artificial Sequence: Synthetic polynucleotide
gaggtgcagctgttggagtctgggggaggcttggtacagcctggggggtccctgcgtctctcctgtgcagcctccggattcacctttcgggattatgagatgtggtgggtccgccaggctccagggaagggtctagagcgggtctcagctattaatccgcagggtacgcgtacatactacgcagactccgtgaagggccggttcaccatctcccgcgacaattccaagaacacgctgtatctgcaaatgaacagcctgcgtgccgaggataccgcggtatatcactgtgcgaaacttccgtttgggttttccgagtggggtcagggaaccctggtcaccgtctcgagc

SEQ ID NO: 1012 - DNA, 348 bp, Artificial Sequence
  Description of Artificial Sequence: Synthetic polynucleotide
gaggtgcagctgttggagtctgggggaggcttggtacagcctggggggtccctgcgtctctcctgtgcagcctccggattcacctttcgggattatgagatgtggtgggtccgccaggctccagggaagggtctagagcgggtctcagctattaatccgcagggtacgcgtacatactacgcagactccgtgaagggccggttcaccatctcccgcgacaattccaagaacacgctgtatctgcaaatgaacagcctgcgtgccgaggacaccgcggtatattactgtgcgaaacttccgcagttgtttcaggactggggtcagggaaccctggtcaccgtctcgagc

SEQ ID NO: 1013 - DNA, 348 bp, Artificial Sequence
  Description of Artificial Sequence: Synthetic polynucleotide
gaggtgcagctgttggagtctgggggaggcttggtacagcctggggggtccctgcgtctctcctgtgcagcctccggattcacctttcgggattatgagatgtggtgggtccgccaggctccagggaagggtctagagcgggtctcagctattaatccgcagggtacgcgtacatactacgcagactccgtgaagggccggttcaccatctcccgcgacaattccaagaacacgctgtatctgcaaatgaacagcctgcgtgccgaggacaccgcggtatattactgtgcgaaacttccgtttttctttcacgagtggggtcagggaaccctggtcaccgtctcgagc

SEQ ID NO: 1014 - DNA, 348 bp, Artificial Sequence
  Description of Artificial Sequence: Synthetic polynucleotide
gaggtgcagctgttggagtctgggggaggcttggtacagcctggggggtccctgcgtctctcctgtgcagcctccggattcacctttcgggattatgagatgtggtgggtccgccaggctccagggaagggtctagagcgggtctcagctattaatccgcagggtacgcgtacatactacgcagactccgtgaagggccggttcaccatctcccgcgacaattccaagaacacgctgtatctgcaaatgaacagcctgcgtgccgaggacaccgcggtatattactgtgcgaaacttccgcactactttaaggactggggtcagggaaccctggtcaccgtctcgagc

SEQ ID NO: 1015 - DNA, 348 bp, Artificial Sequence
  Description of Artificial Sequence: Synthetic polynucleotide
gaggtgcagctgttggagtctgggggaggcttggtacagtctggggggtccctgcgtctctcctgtgcagcctccggattcacctttcgggattatgagatgtggtgggtccgccaggctccagggaagggtctagagcgggtctcagctattaatccgcagggtacgcgtacatactacgcagactccgtgaagggccggttcaccatctcccgcgacaattccaagaacacgctgtatctgcaaatgaacagcctgcgtgccgaggataccgcggtatattactgtgcgaaacttccgttttactttgaggagtggggtcagggaaccctggtcaccgtctcgagc

SEQ ID NO: 1016 - DNA, 348 bp, Artificial Sequence
  Description of Artificial Sequence: Synthetic polynucleotide
gaggtgcagctgttggagtctgggggaggcttggtacagcctggggggtccctgcgtctctcctgtgcagcctccggattcacctttcgggattatgagatgtggtgggtccgccaggctccagggaagggtctagagcgggtctcagctattaatccgcagggtacgcgtacatactacgcagactccgtgaagggccggttcaccatctcccgcgacaattccaagaacacgctgtatctgcaaatgaacagcctgcgtgccgaggataccgcggtatattactgtgcgaaacttccgtttaggttttccgaccggggtcagggaaccctggtcaccgtctcgagc

SEQ ID NO: 1017 - DNA, 348 bp, Artificial Sequence
  Description of Artificial Sequence: Synthetic polynucleotide
gaggtgcagctgttggagtctgggggaggcttggtacagcctggggggtccctgcgtctctcctgtgcagcctccggattcacctttcgggattatgagatgtggtgggtccgccaggctccagggaagggtctagagcgggtctcagctattaatccgcagggtacgcgtacatactacgcagactccgtgaagggccggttcaccatctcccgcgacaattccaagaacacgctgtatctgcaaatgaacagcctgcgtgccgaggacaccgcggtatattactgtgcgaaacttccgacgctgtttcaggactggggtcagggaaccctggtcaccgtctcgagc

SEQ ID NO: 1018 - DNA, 348 bp, Artificial Sequence
  Description of Artificial Sequence: Synthetic polynucleotide
gaggtgcagctgttggagtctgggggaggcttggtacagcctggggggtccctgcgtctctcctgtgcagcctccggattcacctttcgggattatgagatgtggtgggtccgccaggctccagggaagggtctagagcgggtctcagctattaatccgcagggtacgcgtacatactacgcagactccgtgaagggccggttcaccatctcccgcgacaattccaagaacacgctgtatctgcaaatgaacagcctgcgtgccgaggacaccgcggtatattactgtgcgaaacttccgttttacttttccgagtggggtcagggaaccctggtcaccgtctcgaac

SEQ ID NO: 1019 - DNA, 348 bp, Artificial Sequence
  Description of Artificial Sequence: Synthetic polynucleotide
gaggtgcagctgttggagtctgggggaggcttggtacagcctggggggtccctgcgtctctcctgtgcagcctccggattcacctttcgggattatgagatgtggtgggtccgccaggctccagggaagggtctagagcgggtctcagctattaatccgcagggtacgcgtacatactacgcagactccgtgaagggccggttcaccatctcccgcgacaattccaagaacacgctgtatctgcaaatgaacagcctgcgtgccgaggacaccgcggtatattactgtgcgaaacttccgttttggtttcaggagtggggtcagggaaccctggtcaccgtctcgagc

SEQ ID NO: 1020 - DNA, 348 bp, Artificial Sequence
  Description of Artificial Sequence: Synthetic polynucleotide
gaggtgcagctgttggagtctgggggaggcttggtacagcctggggggtccctgcgtctctcctgtgcagcctccggattcacctttcgggattatgagatgtggtgggtccgccaggctccagggaagggtctagagcgggtctcagctattaatccgtggggttcgttgacatactacgcagactccgtgaagggccggttcaccatctcccgcgacaattccaagaacacgctgtatctgcaaatgaacagcctgcgtgccgaggacaccgcggtatattactgtgcgaaacttccgttttactttcaggagtggggtcagggaaccctggtcaccgtctcgagc

SEQ ID NO: 1021 - DNA, 348 bp, Artificial Sequence
  Description of Artificial Sequence: Synthetic polynucleotide
gaggtgcagctgttggagtctgggggaggcttggtacagcctggggggtccctgcgtctctcctgtgcagcctccggattcacctttcgggattatgagatgtggtgggtccgccaggctccagggaagggtctagagcgggtctcagctattaatccgtggggttcgttgacatactacgcagactccgtgaagggccggttcaccatctcccgcgacaattccaagaacacgctgtatctgcaaatgaacagcctgcgtgccgaggataccgcggtatatcactgtgcgaaacttccgatgttctttgaggactggggtcagggaaccctggtcaccgtctcgaac

SEQ ID NO: 1022 - DNA, 348 bp, Artificial Sequence
  Description of Artificial Sequence: Synthetic polynucleotide
gaggtgcagctgttggagtctgggggaggcttggtacagcctggggggtccctgcgtctctcctgtgcagcctccggattcacctttcgggattatgagatgtggtgggtccgccaggctccagggaagggtctagagcgggtctcagctattaatccgtggggttcgttgacatactacgcagactccgtgaagggccggttcaccatctcccgcgacaattccaagaacacgctgtatctgcaaatgaacagcctgcgtgccgaggacaccgcggtatattactgtgcgaaacttccgttttactttcacgagtggggtcagggaaccctggtcaccgtctcgagc

SEQ ID NO: 1023 - DNA, 348 bp, Artificial Sequence
  Description of Artificial Sequence: Synthetic polynucleotide
gaggtgcagctgttggagtctgggggaggcttggtacagcctggggggtccctgcgtctctcctgtgcagcctccggattcacctttcgggattatgagatgtggtgggtccgccaggctccagggaagggtctagagcgggtctcagctattaatccgtggggttcgttgacatactacgcagactccgtgaagggccggttcaccatctcccgcgacaattccaagaacacgctgtatctgcaaatgaacagcctgcgtgccgaggacaccgcggtatattactgtgcgaaacttccgtttttctttcaggagtggggtcagggaaccctggtcaccgtctcgagc

SEQ ID NO: 1024 - DNA, 348 bp, Artificial Sequence
  Description of Artificial Sequence: Synthetic polynucleotide
gaggtgcagctgttggagtctgggggaggcttggtacagcctggggggtccctgcgtctctcctgtgcagcctccggattcacctttcgggattatgagatgtggtgggtccgccaggctccagggaagggtctagagcgggtctcagctattaatccgtggggttcgttgacatactacgcagactccgtgaagggccggttcaccatctcccgcgacaattccaagaacacgctgtatctgcaaatgaacagcctgcgtgccgaggacaccgcggtatattactgtgcgaaacttccgtttttctttcacgagtggggtcagggaaccctggtcaccgtctcgagc

SEQ ID NO: 1025 - DNA, 348 bp, Artificial Sequence
  Description of Artificial Sequence: Synthetic polynucleotide
gaggtgcagctgttggagtctgggggaggcttggtacagcctggggggtccctgcgtctctcctgtgcagcctccggattcacctttcgggattatgagatgtggtgggtccgccaggctccagggaagggtctagagcgggtctcagctattaatccgtggggtgggttcacatactacgcagactccgtgaagggccggttcaccatctcccgcgacaattccaagaacacgctgtatctgcaaatgaacagcctgcgtgccgaggataccgcggtatattactgtgcgaaacttccgttttactttcaggagtggggtcagggaaccctggtcaccgtctcgagc

SEQ ID NO: 1026 - DNA, 348 bp, Artificial Sequence
  Description of Artificial Sequence: Synthetic polynucleotide
gaggtgcagctgttggagtctgggggaggcttggtacagcctggggggtccctgcgtctctcctgtgcagcctccggattcacctttcgggattatgagatgtggtgggtccgccaggctccagggaagggtctagagcgggtctcagctattaatccgtggggtgggttcacatactacgcagactccgtgaagggccggttcaccatctcccgcgacaattccaagaacacgctgtatctgcaaatgaacagcctgcgtgccgaggataccgcggtatatcactgtgcgaaacttccgatgttctttgaggactggggtcagggaaccctggtcaccgtctcgaac

SEQ ID NO: 1027 - DNA, 348 bp, Artificial Sequence
  Description of Artificial Sequence: Synthetic polynucleotide
gaggtgcagctgttggagtctgggggaggcttggtacagcctggggggtccctgcgtctctcctgtgcagcctccggattcacctttcgggattatgagatgtggtgggtccgccaggctccagggaagggtctagagcgggtctcagctattaatccgtggggtgggttcacatactacgcagactccgtgaagggccggttcaccatctcccgcgacaattccaagaacacgctgtatctgcaaatgaacagcctgcgtgccgaggacaccgcggtatattactgtgcgaaacttccgttttactttcacgagtggggtcagggaaccctggtcaccgtctcgagc

SEQ ID NO: 1028 - DNA, 348 bp, Artificial Sequence
  Description of Artificial Sequence: Synthetic polynucleotide
gaggtgcagctgttggagtctgggggaggcttggtacagcctggggggtccctgcgtctctcctgtgcagcctccggattcacctttcgggattatgagatgtggtgggtccgccaggctccagggaagggtctagagcgggtctcagctattaatccgtggggtgggttcacatactacgcagactccgtgaagggccggttcaccatctcccgcgacaattccaagaacacgctgtatctgcaaatgaacagcctgcgtgccgaggacaccgcggtatattactgtgcgaaacttccgtttttctttcaggagtggggtcagggaaccctggtcaccgtctcgagc

SEQ ID NO: 1029 - DNA, 348 bp, Artificial Sequence
  Description of Artificial Sequence: Synthetic polynucleotide
gaggtgcagctgttggagtctgggggaggcttggtacagcctggggggtccctgcgtctctcctgtgcagcctccggattcacctttcgggattatgagatgtggtgggtccgccaggctccagggaagggtctagagcgggtctcagctattaatccgtggggtgggttcacatactacgcagactccgtgaagggccggttcaccatctcccgcgacaattccaagaacacgctgtatctgcaaatgaacagcctgcgtgccgaggataccgcggtatattactgtgcgaaacttccgtttttctttcacgagtggggtcagggaaccctggtcaccgtctcgagc

SEQ ID NO: 1030 - DNA, 348 bp, Artificial Sequence
  Description of Artificial Sequence: Synthetic polynucleotide
gaggtgcagctgttggagtctgggggaggcttggtacagcctggggggtccctgcgtctctcctgtgcagcctccggattcacctttcgggattatgagatgtggtgggtccgccaggctccagggaagggtctagagcgggtctcagctattaatccgtggggtgggttgacatactacgcagactccgtgaagggccggttcaccatctcccgcgacaattccaagaacacgctgtatctgcaaatgaacagcctgcgtgccgaggataccgcggtatattactgtgcgaaacttccgttttactttcaggagtggggtcagggaaccctggtcaccgtctcgagc

SEQ ID NO: 1031 - DNA, 348 bp, Artificial Sequence
  Description of Artificial Sequence: Synthetic polynucleotide
gaggtgcagctgttggagtctgggggaggcttggtacagcctggggggtccctgcgtctctcctgtgcagcctccggattcacctttcgggattatgagatgtggtgggtccgccaggctccagggaagggtctagagcgggtctcagctattaatccgtggggtgggttgacatactacgcagactccgtgaagggccggttcaccatctcccgcgacaattccaagaacacgctgtatctgcaaatgaacagcctgcgtgccgaggataccgcggtatatcactgtgcgaaacttccgatgttctttgaggactggggtcagggaaccctggtcaccgtctcgaac

SEQ ID NO: 1032 - DNA, 348 bp, Artificial Sequence
  Description of Artificial Sequence: Synthetic polynucleotide
gaggtgcagctgttggagtctgggggaggcttggtacagcctggggggtccctgcgtctctcctgtgcagcctccggattcacctttcgggattatgagatgtggtgggtccgccaggctccagggaagggtctagagcgggtctcagctattaatccgtggggtgggttgacatactacgcagactccgtgaagggccggttcaccatctcccgcgacaattccaagaacacgctgtatctgcaaatgaacagcctgcgtgccgaggacaccgcggtatattactgtgcgaaacttccgttttactttcacgagtggggtcagggaaccctggtcaccgtctcgagc

SEQ ID NO: 1033 - DNA, 348 bp, Artificial Sequence
  Description of Artificial Sequence: Synthetic polynucleotide
gaggtgcagctgttggagtctgggggaggcttggtacagcctggggggtccctgcgtctctcctgtgcagcctccggattcacctttcgggattatgagatgtggtgggtccgccaggctccagggaagggtctagagcgggtctcagctattaatccgtggggtgggttgacatactacgcagactccgtgaagggccggttcaccatctcccgcgacaattccaagaacacgctgtatctgcaaatgaacagcctgcgtgccgaggataccgcggtatattactgtgcgaaacttccgtttttctttcaggagtggggtcagggaaccctggtcaccgtctcgagc

SEQ ID NO: 1034 - DNA, 348 bp, Artificial Sequence
  Description of Artificial Sequence: Synthetic polynucleotide
gaggtgcagctgttggagtctgggggaggcttggtacagcctggggggtccctgcgtctctcctgtgcagcctccggattcacctttcgggattatgagatgtggtgggtccgccaggctccagggaagggtctagagcgggtctcagctattaatccgtggggtgggttgacatactacgcagactccgtgaagggccggttcaccatctcccgcgacaattccaagaacacgctgtatctgcaaatgaacagcctgcgtgccgaggataccgcggtatattactgtgcgaaacttccgtttttctttcacgagtggggtcagggaaccctggtcaccgtctcgagc

SEQ ID NO: 1035 - DNA, 348 bp, Artificial Sequence
  Description of Artificial Sequence: Synthetic polynucleotide
gaggtgcagctgttggagtctgggggaggcttggtacagcctggggggtccctgcgtctctcctgtgcagcctccggattcacctttcgggattatgagatgtggtgggtccgccaggctccagggaagggtctagagcgggtctcagctattaatccgcagggtacgcgtacatactacgcagactccgtgaagggccggttcaccatctcccgcgacaattccaagaacacgctgtatctgcaaatgaacagcctgcgtgccgaggacaccgcggtatatcactgtgcgaaacttccgatgttctttgaggactggggtcagggaaccctggtcaccgtctccagc

SEQ ID NO: 1036 - DNA, 357 bp, Artificial Sequence
  Description of Artificial Sequence: Synthetic polynucleotide
gaggtgcagctgttggagactgggggaggcttggtacagcctggggggtccctgcgtctctcctgtgcagcctccggattcaccttttcgacttatcatatgcagtgggtccgccgggctccagggaagggcctggagtgggtctcaatgattgatgcggatggtcttgggacatactacgcagaccccgtgaagggccggttcaccatctcccgcgacaattccaagaacacgctgtatctgcaaatgaacagcctgcgtgccaaggacaccgcggtatattactgtgcgagaccgggtccgcagtttggtcagtttgactacttgggtcagggaaccctggtcaccgtctcgagc

SEQ ID NO: 1037 - DNA, 357 bp, Artificial Sequence
  Description of Artificial Sequence: Synthetic polynucleotide
gaggtgcagctgtttgagtctgggggaggcttggtacagactggggggtccctgcgtctctcctgtgcagcctccggattcaccttttcgacttatcatatgcagtgggtccgccaggctccagggaagggtctggagtgggtctcaatgattgatgcggatggtcttgggaaatactacgcagaccccgtgaagggccggttcaccatctcccgcgacaattccaagaacacgctgtatctgcaaatgaacagcctgcgtgccgaggacaccgcggtatattactgtgtgaaaccgggtccgcagtttggtcagtatgactactggggtcagggaaccctggtcaccgtctcgagc

SEQ ID NO: 1038 - DNA, 363 bp, Artificial Sequence
  Description of Artificial Sequence: Synthetic polynucleotide
gaggtgcagctgttggagtcagggggaggcttggtacagcctggggggtccctgcggctctcctgttcagcttccggattcaccttttcggggtatgatatgcagtgggtccgccaggctccagggaagggtctagagtgggtctcaacgattagtgcgtcgggtgtttatacatactacgcagactccgtgaagggccggttcaccatctcccgcgacaattccaagaacacgctgtatctgcaaatgaacagcctgcgtgccgaggacaccgcggtatattactgtgcgaaatatcctaatcgttttgcgcttaatagttttgactacaggggtcggggaaccctggtcaccgtctcgagc

SEQ ID NO: 1039 - DNA, 363 bp, Artificial Sequence
  Description of Artificial Sequence: Synthetic polynucleotide
gaggtgcagctgttggagtctgggggaggcttggtacagcctggggggtccctgcgtctctcctgtgcagcttccggattcaccttttcggggtatgatatgcagtgggtccgccaggctccagggaggggtctagagtgggtctcaacgattagtgcgtcgggtgtttatacatactacacagactccgtgaagggccggttcaccacctcccgcgacaattccaagaacacgctgtatctgcaaatgaacagcctgcgtgccgaggacaccgcggtatattactgtacgaaatatccaaatcgttttgcgcgtaataattttgactactggggtcagggaaccctggtcaccgtctcgagc

SEQ ID NO: 1040 - DNA, 324 bp, Artificial Sequence
  Description of Artificial Sequence: Synthetic polynucleotide
gacatcctgatgacccagtctccatcctccctgtctgcatctgtaggagaccgtgtcaccatcacttgccgggcaaatagttctattttgtgggcgttagcttggtaccagcagaaaccaggggaagcccctaagctcctgatcgagagttcttccggtttgcaaagtggggtcccatcacgtttcagtggcagtggatctgggacagatttcactctcaccatcagcagtctgcaacctgaagattttgctacgtactactgtgttcagaatgcggtttggcctggtacgttcagccaagggaccaaggtggaaatcaaacgg

SEQ ID NO: 1041 - DNA, 324 bp, Artificial Sequence
  Description of Artificial Sequence: Synthetic polynucleotide
gacatccagatgacccagtctccatcctccctgtctgcatctgtaggagaccgtgtcaccatcacttgccgggcagacagttctattttgtgggcgttagcttggtaccagcagaaaccagggaaagcccctaagctcctgatcgagagttcatccggtttgcaaagtggggtcccatcacgtttcagtggcagtggatctgggacagatttcactctcaccatcagcagtctgcaacctgaagattttgctacgtactactgtgttcagaatgcggtttggcctggtacgttcggccaagggaccaaggtggaaatcaaacgg

SEQ ID NO: 1042 - DNA, 324 bp, Artificial Sequence
  Description of Artificial Sequence: Synthetic polynucleotide
gacatccagatgaccgtgtctccatcctccctgtctgcatctgtaggagaccgtgtcaccatcacttgccgggcagatagttctattttgtgggcgttagcttggtaccagcagaaaccagggaaagcccctaagctcctgatcgagagttcttccggattgcaaagcggggtcccatcacgtttcagtggcagtggatctgggacagatttcactctcaccatcagcagtctgcaacctgaagattttgctacgtactactgtgttcagaatgcggtttggcctggtacgttcggccaagggaccaaggtggaaatcaaacgg

SEQ ID NO: 1043 - DNA, 324 bp, Artificial Sequence
  Description of Artificial Sequence: Synthetic polynucleotide
gacatccagatgacccagtctccatcctccctgtctgcatctgtaggagaccgtgtcaccatcacttgccgggcaaatagttctattttgtgggcgttagcttggtaccagcagaaaccagggaaagcccctaagctcctgatcgagagttcttccggtttgcaaagtggggtcccatcacgtttcagtggcagtggatctgggacagatttcactctcaccatcagcagtctgcaacctgaagattttgctacgtactactgtgttcagaatgcggtttggcctggtacgttcgaccaagggaccaaggtggaaatcaaacgg

SEQ ID NO: 1044 - DNA, 324 bp, Artificial Sequence
  Description of Artificial Sequence: Synthetic polynucleotide
gacatccagatgacccagtctccatcctccctgtctgcatctgtaggagaccgtgtcaccatcacttgccgggcaaatagttctattttgtgggcgttagcttggtaccagcagaaaccagggaaagcccctaagctcctgatcgagagttctaccggtttgcaaagtggggtcccatcacgtttcagtggcagtggatctgggacagatttcactctcaccatcagcagtctgcaacctgaagattttgctacgtactactgtgttcagaatgcggtttggcctggtacgttcggccaagggaccaaggtggaaatcaaacgg

SEQ ID NO: 1045 - DNA, 324 bp, Artificial Sequence
  Description of Artificial Sequence: Synthetic polynucleotide
gacatccagatgaccgtgtctccatcctccctgtctgcatctgtaggagaccgtgtcaccatcacttgccgggcaaatagttctattttgtgggcgttagcttggtaccagcagaaaccagggaaagcccctaagctcctgatcgagagttcttccggattgcaaagcggggtcccatcacgtttcagtggcagtggatctgggacagatttcactctcaccatcagcagtctgcaacctgaagattttgctacgtactactgtgttcagaatgcggtttggcctggtacgttcggccaagggaccaaggtggaaatcaaacgg

SEQ ID NO: 1046 - DNA, 324 bp, Artificial Sequence
  Description of Artificial Sequence: Synthetic polynucleotide
gacatccagatgacccagtctccatcctccctgtctgcatctgtaggagaccgtgtcaccatcacttgccgggcagatagttctattttgtgggcgttagcttggtaccagcagaaaccagggaaagcccctaagctcctgatcgagagttcttccggtttgcaaagtggggtcccatcacgtttcagtggcagtggatctgggacagatttcactctcaccatcagcagtctgcaacctgaagattttgctacgtactactgtgttcagaatgcggtttggcctggtacgttcgaccaagggaccaaggtggaaatcaaacgg

SEQ ID NO: 1047 - DNA, 324 bp, Artificial Sequence
  Description of Artificial Sequence: Synthetic polynucleotide
gacatccagatgacccagtctccatcctcactgtctgcatctgtaggagaccgtgtcaccatcacttgccgggcaaatagttctattttgtgggcgttagcttggtaccagcagaaaccagggaaagcccctgagctcctgatcgagagttcttccggtctgcaaagtggggtcccatcacgtttcagtggcagtggatctgggacagatttcactctcaccatcagcagtctgcaacctgaagattttgctacgtactactgtgttcagaatgcggtttggcctggtacgttcggccaagggaccaaggtggaaatcaaacgg

SEQ ID NO: 1048 - DNA, 324 bp, Artificial Sequence
  Description of Artificial Sequence: Synthetic polynucleotide
gacatccagatgacccagtctccatcctccctgtctgcatctgtaggagaccgtgtcaccatcacttgccgggcgaatagttctatattgtgggcgttggcttggtaccagcagaaaccagggaaagcccctaagctcctgatcgagagttcttccggtttgcaaagtggggtcccatcacgtttcagtggcagtggatctgggacagatttcactctcaccatcagcagtctgcaacctgaagattttgctacgtactactgtgttcagaatgcggtttggcctggtacgttcggccaagggaccaaggtggaaaacaaacgg

SEQ ID NO: 1049 - DNA, 324 bp, Artificial Sequence
  Description of Artificial Sequence: Synthetic polynucleotide
gacatccagatgacccagtctccatcctccctgtctgcatctgtaggagaccgtgtcaccatcacttgccgggcaaatagttctattctgtgggcgttagcttggtaccagcagaaacctgggaaagcccctaagctcctgatcgagagttcttccggtttgcaaagtggggtcccatcacgtttcagtggcagtggatctgggacagatttcactctcaccatcagcagtctgcaacccgaagattttgctacgtactactgtgttcagaatgcggtttggcctggtacgttcggccaagggaccaaggtggaaatcaaacgg

SEQ ID NO: 1050 - DNA, 324 bp, Artificial Sequence
  Description of Artificial Sequence: Synthetic polynucleotide
gacatccagatgacccagtctccatcctccctgtctgcttctgtaggagaccgtgtcaccatcacttgccgggcaaatagttctattttgtgggcgttagcttggtaccagcagaaaccagggaaagcccctaagctcctgatcgagagttcttccggtttgcaaagtgggatcccatcacgtttcagtggcagtggatctgggacagatttcactctcaccatcagcagtctgcaacctgaagattttgctacgtactactgtgttcagaatgcggtttggcctggtacgttcggccaagggaccaaggtggaaatcaaacgg

SEQ ID NO: 1051 - DNA, 324 bp, Artificial Sequence
  Description of Artificial Sequence: Synthetic polynucleotide
gacatccagatgacccagtctccatcctccctgtctgcatctgttggagaccgtgtcaccatcacttgccgggcaaatagttctattttgtgggcgttagcttggtaccagcagaaaccagggaaagcccctaagctcctgatcgagagttcttccggattgcaaagcggggtcccatcacgtttcagtggcagtggatctgggacagatttcactctcaccatcagcagtctgcaacctgaagattttgctacgtactactgtgttcagaatgcggtttggcctggtacgttcggccaagggaccaaggtggaaatcaaacgg

SEQ ID NO: 1052 - DNA, 324 bp, Artificial Sequence
  Description of Artificial Sequence: Synthetic polynucleotide
gacatcctgttgacccagtctccatcctccctgtctgcatctgtaggagaccgtgtcaccatcacttgccgggcaaatagttctattttgtgggcgttagcttggtaccagcagaaaccagggaaagcccctaagctcctgatcgagagttcttccggtttgcaaagtggggtcccatcacgtttcagtggcagtggatctgggacagatttcactctcaccatcagcagtctgcaacctgaagattttgctacgtactactgtgttcagaatgcggtttggcctggtacgttcggccaagggaccaaggtggaaatcaaacgg

SEQ ID NO: 1053 - DNA, 324 bp, Artificial Sequence
  Description of Artificial Sequence: Synthetic polynucleotide
gacatccagatgacccagtctccatcctccctgtctgcatctgtaggagaccgtgtcaccatcacttgccgggcaaatagttctattttgtgggcgttagcttggtaccagcagaaaccagggaaagcccctaagctcctgatcgagagttcttccggtttgcaaagtggggtcccatcacgtttcagtggaagtggaactgggacagatttcactctcaccatcagcggtctgcaacctgaagattttgctacgtactactgtgttcagaatgcggtttggcctggtacgttcgaccaagggaccaaggtggaaatcaaacgg

SEQ ID NO: 1054 - DNA, 324 bp, Artificial Sequence
  Description of Artificial Sequence: Synthetic polynucleotide
gacatccagatgacccagtctccatcctccctgtctgcatctgtaggagaccgtgtcaccatcccttgccgggcaaatagttctattttgtgggcgttagcttggtaccagcagaaaccagggaaagcccctaagctcctgatcgagagttcttccggtttgcaaagtggggtcccatcacgtttcagtggcagtgcatctgggacagatttcactctcaccatcagcagtctgcaacctgaagattttgctacgtactactgtgttcagaatgcggtttggcctggtacgttcggccaagggaccaaggtggagatcaaacgg

SEQ ID NO: 1055 - DNA, 324 bp, Artificial Sequence
  Description of Artificial Sequence: Synthetic polynucleotide
gacatccagatggcccagtctccatcctccctgtctgcatctgtaggagaccgtgtcaccatcacttgccgggcaagtcagacgattgagcgtcgtttaaattggtatcagcagaaaccagggaaagcccctaagctcctgatctatcttgcttcccgtttgcaaagtggggtcccatcacgtttcagtggcagtggatctgggacagatttcactctcaccatcagcagtctgcaacctgaagattttgctacgtactactgtcatcagtatgcgagtccacctttgacgttaggccaagggaccaaagtggaaatcaaacgg

SEQ ID NO: 1056 - DNA, 324 bp, Artificial Sequence
  Description of Artificial Sequence: Synthetic polynucleotide
gacatccagatgacccagtctccatcctccctgtctgcatctgtaggagacagtgtcaccatcacttgccgggcaagtcagacgattgagcgtcgtttaaattggtatcagcagaaaccaggggaagcccctaagctcctgatctatcttgcttcccgtttgcaaagtggggtcccatcacgtttcagtggcagtggatctgggacagatttcactctcaccatcagcagtctgcaacctgaagattttgctacgtactactgccatcagtatgcgagtccacctttgacgttcggccaagggaccaatgtggaaatcaaacgg

SEQ ID NO: 1057 - DNA, 324 bp, Artificial Sequence
  Description of Artificial Sequence: Synthetic polynucleotide
gacatccagatgacccagtctccatcctccctatctgcatctgtaggagaccgtgtcaccatcacttgccgggcaagtcagacgattgagcgtcgtttaaattggtatcagcagaaaccagggaaagcccctaagctcctgatctatcttgcttcccgtttgcaaagtggggtcccatcacgtttcagtggcagtggatctgggacagatttcactctcaccatcagcagtctgcaacctgaagattttgctgcgtactactgtcatcagtacgagagtccacctttgacgtttggccaagggaccaaagtggaaatcaaacgg

SEQ ID NO: 1058 - DNA, 324 bp, Artificial Sequence
  Description of Artificial Sequence: Synthetic polynucleotide
gacatccagatgacccagtctccatcctccctgtctgcatctgtaggagaccgtgtcaccatcacttgccgggcaagtcggacgattgagcgtcgtttaaattggtatcagcagaaaccagggaaagcccctaagctcctgatctatcttgcttcgcgtttgcaaagtggggtcccatcacgtttcagtggcagtggatctgggacagatttcactctcaccatcagcagtctgcaacctgaagattttgctacgtactactgtcatcagtatgagagtccacctttgacgttcggccaagggaccaaagtggaaatcaaacgg

SEQ ID NO: 1059 - DNA, 324 bp, Artificial Sequence
  Description of Artificial Sequence: Synthetic polynucleotide
gacatccagatgacccagtctccatcctccctgtctgcatctgtaggagaacgtgtcaccatcacttgccgggcaagtcagacgattgagcgtcgtttaaattggtatcagcagaaaccagggaaagcccctaagctcctgatctatcttgcttcccgtttgcaaagtggggtcccatcacgtttcagtggcagtggatctgggacagatttcactctcaccatcagcaatctgcaacctgaagattctgctacgtactactgtcatcagtatgcgagtccacctttgacgttaggccaagggaccaaagtggaaatcaaacgg

SEQ ID NO: 1060 - DNA, 324 bp, Artificial Sequence
  Description of Artificial Sequence: Synthetic polynucleotide
gacatccagatgacccagtctccatcctccctgtctgcatctgtaggagaccgtgtcaccatcacttgccgggcaagccagacgattgagcgtcgtttaaattggtatcagcagaaaccagggaaggcccctaagctcctgatctatcttgcttcccgtttgcaaagtggggtcccatcacgtttcagtggcagtggatctgggacagatttcactctcaccatcagcagtctgcaacctgaagattttgctacgtactactgtcatcagtatgcgagtccacctttgacgttaggccaagggaccaaagtggaaatcaaacgg

SEQ ID NO: 1061 - DNA, 324 bp, Artificial Sequence
  Description of Artificial Sequence: Synthetic polynucleotide
gacatccagataacccagtctccatcctccctgtctgcatctgtaggagaccgtgtcaccatcacttgccgggcaagtcagacgattgagcgtcgtttaaattggtatcagcagaaaccagggaaagaccctaagctcctgatctatcttgcttcccgtttgcaaagtggggtcccatcacgtttcagtggcagtggatctgggacagatttcactctcaccatcagcagtctgcaacctgaagattttgctacgtactactgtcatcagtatgagagtcctcctttgacgttcggccaagggaccaaagtggaaatcaaacgg

SEQ ID NO: 1062 - DNA, 324 bp, Artificial Sequence
  Description of Artificial Sequence: Synthetic polynucleotide
gacatccagatgacccagtctccatcctccctgtctgcatctgtaggagaccgtgtcaccatcacttgccgggcaagtcagacgattgagcgtcgtttaaattggtatcagcagaaaccaggggaagcccctaagctcctgatctatcttgcttcccgtttgcaaagtggggtcccatcacgtttcagtggcagtggatctgggacagatttcactctcaccatcagcagtctgcaacctgaagattttgctacgtactactgtcatcagtatgagagtccacctttgacgttcggccaagggaccaaagtggaaatcaaatgg

SEQ ID NO: 1063 - DNA, 324 bp, Artificial Sequence
  Description of Artificial Sequence: Synthetic polynucleotide
gacatccagttgacccagtctccatcctccctgtctgcatctgtaggagaccgagtcaccatcacttgccgggcaagtcagacgattgagcgtcgtttaaattggtatcagcagaaaccagggaaagcccctaagctcctgatctatcttgcttcccgtttgcaaagtggggtcccatcacgtttcagtggcagtggatctgggacagaattcactctcaccatcagcagtctgcaacctgaagattttgctacgtactactgtcatcagtatgagagtccacctttgacgttcggccaagggaccaaagtggaaatcaaacgg

SEQ ID NO: 1064 - DNA, 324 bp, Artificial Sequence
  Description of Artificial Sequence: Synthetic polynucleotide
gacatccagatgtcccagtctccatccaccctgtctgcatctgtaggagaccgtgtcaccatcacttgccgggcaagtcagacgattgagcgtcgtttaaattggtatcagcagaaaccagggaaagcccctaagctcctgatctatcttgcttcccgcttgcaaagtggggtcccatcacgtttcagtggcagtggatctgggacagatttcactctcaccatcagcagtctgcaacctgaagattttgctacgtactactgtcatcagtatgagagtccacctttgatgttcggccaagggaccaaagtggaaatcaaacgg

SEQ ID NO: 1065 - DNA, 324 bp, Artificial Sequence
  Description of Artificial Sequence: Synthetic polynucleotide
gacatccagatgacccagtctccatcctccctgtctgcatctgtaggagaccgtgtcaccattacttgccgggcaagtcagacgattgagcgtcgtttaaattggtatcagcagaaaccagggaaagaccctaagctcctgatctatcttgcttcccgtttgcaaagtggggtcccatcacgtttcagtggcagtggatctgggacagatttcactctcaccatcagcagtctgcaaccagaagattttgctacgtactactgtcatcagtatgagagtccacctttgacgttcggccaagggaccaaagtggaaatcaaacgg

SEQ ID NO: 1066 - DNA, 324 bp, Artificial Sequence
  Description of Artificial Sequence: Synthetic polynucleotide
gacatccagatgacccagtctccatcctccctgtctgcatccgtaggagaccgtgtcaccatcacttgccgggcaagtcagacgattgagcgtcgtttaaactggtatcagcagaaaccagggaaagcccctaagctcctgatctatcttgcttcccgtttgcaaagtggggtcccatcacgtttcagtggcagtggatctgggacagatttcactctcaccatcagcagtctgcaacctgaagattttgctacgtactactgtcatcagtatgagagtccacctttgacgttcggccaagggaccaaagtggaaatcaaacgg

SEQ ID NO: 1067 - DNA, 324 bp, Artificial Sequence
  Description of Artificial Sequence: Synthetic polynucleotide
gacatccagatgacccagtctccatcctccctgtttgcatctgtaggggaccgtgtcaccatcacttgccgggcaagtcagacgattgagcgtcgtttaaattggtatcagcagaaaccagggaaagcccctaagctcctgatctatcttgcttcccgtttgcaaagtggggtcccatcacgtttcagtggcagtggatctgggacagatttcactctcaccatcagcagtctgcaacctgaagattttgctacgtactactgtcatcagtatgagagtccacctttgacgttcggccaagggaccaaagtggaaatcaaacgg

SEQ ID NO: 1068 - DNA, 324 bp, Artificial Sequence
  Description of Artificial Sequence: Synthetic polynucleotide
gacatccagatgacccagtatccatcctccctgtctgcatctgtaggagaccgtgtcaccatcacttgccgggcaagtcagtcgattgagcgtcgtttaaattggtatcagcagaaaccaggggaagcccctaagctcctgatctatcttgcttcccgtttgcaaagtggggtcccatcacgtttcagtggcagtggatctgggacagatttcactctcaccatcagcagtctgcaacctgaagattttgctacgtactactgtcatcagtatgagagtccacctttgacgttcggccaagggactaaagtggaaatcaaacgg

SEQ ID NO: 1069 - DNA, 324 bp, Artificial Sequence
  Description of Artificial Sequence: Synthetic polynucleotide
gacatccagatgacccagtctccatcctccctgtctgcatctgtaggagaccgtgtcaccatcacttgccgggcaagtcggacgattgagcgtcgtttaaattggtatcagcagaaaccagggaaagcccctaagctcctgatctatcttgcttcgcgtttgcaaagtggggtcccatcacgtttcagtggcagtggatctgggacagatttcactctcaccatcagcagtctgcaacctgaagattttgctacgtactactgtcatccgtatgagagtccacctttgacgttcggccaagggaccaaagtggaaatcaaacgg

SEQ ID NO: 1070 - DNA, 324 bp, Artificial Sequence
  Description of Artificial Sequence: Synthetic polynucleotide
gacatccagatgacccagtctccatcctccctgtctgcatctgtaggagaccgtgtcaccatcacttgccgggcaagtcaggcgattgagcgtcgtttaaattggtatcagcagaaaccagggaaagcccctaagctcctgatctatcttgcttcccgtttgcaaagtggggtcccatctcgtttcagtggcagtggatctgggacagatttcactctcaccatcagcagtctgcagccagaagattttgctacgtactactgtcatcagtatgcgagtccacctttgacgctcggccaagggaccaaagtggaaatcaaacgg

SEQ ID NO: 1071 - DNA, 324 bp, Artificial Sequence
  Description of Artificial Sequence: Synthetic polynucleotide
aacatccagatgacccagtctccatcctccctgtctgcatctgtaggagaccgtgtcaccatcacttgccgggcaagtcaggcgattgagcgtcgtttaaattggtatcagcagaaaccagggaaagcccctaagctcctgatctatcttgcttctcgtttgcaaagtggggtcccatcacgtttcagtggcagtggatctgggacagatttcactctcaccatcagcagtctgcaacctgaagattttgctacgtactactgtcatcagtatgagagtccacctttgacgttcggccaagggaccaaagtggaaatcaaacgg

SEQ ID NO: 1072 - DNA, 324 bp, Artificial Sequence
  Description of Artificial Sequence: Synthetic polynucleotide
gacatccagatgacccagtctccatcctccctgtctgcatctgtaggagaccgtgtcaccatcacttgccgggcaagtcagacgattgggcgtcgtttaaattggtatcagcagaaaccagggaaagcccctaagctcctgatctatcttgcttcccgtttgcaaagtggggtcccatcacgtttcagtggcagtggatctgggtcagatttcactctcaccatcagcagtctgcaacctgaagattttgctacgtactactgtcatcagtatgagagtccacctttgacgttcggccaagggaccaaagtggaaatcaaacgg

SEQ ID NO: 1073 - DNA, 324 bp, Artificial Sequence
  Description of Artificial Sequence: Synthetic polynucleotide
gacatccagatgacccagtctccatcctccctttctgcatctgtaggagaccgtgtcaccatcacttgccgagcaagtcagacgattgagcgtcgtttaaattggtatcagcagaaaccagggaaagcccctaagctcctgatctatcttgcttcccgtttgcaaagtggggtcccatcacgtttcagtggcagtggatctgggacagaatttactctcaccatcagcagtctgcaacctgaagattttgctacgtactactgtcatcagtatgagagtccacctttgacgttcggccaagggaccaaagtggaaatcaaacgg

SEQ ID NO: 1074 - DNA, 324 bp, Artificial Sequence
  Description of Artificial Sequence: Synthetic polynucleotide
gacatccagatgacccagactccatcctccctgtctgcatctgtaggagaccgtgtcaccatcacttgccgggcaagtcagacgattgagcgtcgtttaaattggtatcagcagaaaccaggggaagcccctaagctcctgatctatcttgcttcccgtttgcaaagtggggtcccatcacgtttcagtggcagtggatctgggacagatttcactctcaccatcagcagtctgcaacctgaagattttgccacgtactactgtcatcagtatgagagtccacctttgacgttcggccaagggaccaaagtgaaaatcaaacgg

SEQ ID NO: 1075 - DNA, 324 bp, Artificial Sequence
  Description of Artificial Sequence: Synthetic polynucleotide
gacatccagatgacccagtctccatcctccctgtctgcatctgtaggagacagtgtcaccatcacttgccgggcaagtcagacgattgagcgtcgtttaaattggtatcagcagaaaccagggaaagcccctaagctcctgatctatcttgcttcccgtttgcaaagtggggtcccatcacgtttcagtggcagtggatctgggacagatttcactctcaccatcagcagtctgcaacccgaagattttgctacgtactactgtcatcagtatgagagtccacctttgacgttcggccaagggaccaaagtggaaatcaaacgg

SEQ ID NO: 1076 - DNA, 324 bp, Artificial Sequence
  Description of Artificial Sequence: Synthetic polynucleotide
cacatccagatgacccagtctccatcctccctgtctgcatctgtaggagaccgtgtcaccatcacttgccgggcaagtcagacgattgagcgtcgtttaaattggtatcagcagaaaccagggaaagcccctaagctcctgatctatcttgcttcccgtttgcaaagtggggtcccatcacgtttcagtggcagtggatctgggacagatttcactctcaccatcagcagtctgcaacctgaagattttgctacgtactactgccatcagtatgagagtccacctttgacgttcggccaagggaccaaagtggaaatcaaacgg

SEQ ID NO: 1077 - DNA, 324 bp, Artificial Sequence
  Description of Artificial Sequence: Synthetic polynucleotide
gacgtccagatgacccagtctccatcctccctgtctgcatctgtaggagaccgtgtcaccatcacttgccgggcaagtcagacgattgagcgtcgtttaaattggtatcagcagaaaccaggggaagcccctaagctcctgatctatcttacttcccgtttgcaaagcggggtcccatcacgtttcagtggtagtggatctgggacagatttcactctcaccatcagcagtctgcaacctgaagattttgctacgtactactgccatcagtatgcgagtccacctttgacgttcggccaagggaccaaggtggaaatcaaacgg

SEQ ID NO: 1078 - DNA, 324 bp, Artificial Sequence
  Description of Artificial Sequence: Synthetic polynucleotide
gacatccagatgacccagtcgccatcctccctgtctgcatctgtaggagaccgtgtcaccatcacttgccgggcaagtcagacgattgagcgtcgtttaaattggtatcagcagaaaccagggaaagcccctaagctcctgatctatcttgcttcccgtttgcaaagtggggtcccatcacgtttcagtggcagtggatctgggacagatttcactctcaccatcagcagtctgcaacctgaagattttgctacgtactactgtcaccagtatgagagtccacctttgacgttcggccaagggaccaaagtggtaatcaaacgg

SEQ ID NO: 1079 - DNA, 324 bp, Artificial Sequence
  Description of Artificial Sequence: Synthetic polynucleotide
gacatccagatgacccagtctccatcctccctgtctgcatctgtaggagaccgagtcaccatcacttgccgggcaagtcagacgattgagcgtcgtttaaattggtatcagcagaaacctgggaaagcccctaggctcctgatctatcttgctacccgtttgcaaagtggggtcccatcacgcttcagtggcagtggatctgggacagatttcactctcaccatcagcagtctgcaacctgaagattttgctacgtactactgtcatcagtatgagagtccacctttgacgttcggccaagggaccaaagtggaaatcaaacgg

SEQ ID NO: 1080 - DNA, 324 bp, Artificial Sequence
  Description of Artificial Sequence: Synthetic polynucleotide
gacatccagatgacccagtctccatcctccctgtctgcatctgtaggagaccgtgtcaccatcacttgccgggcaagtcagccgattgagcgtcgtttaaattggtatcagcagaagccagggaaagcccctaagctcctgatctatcttgcttcccgtttgcaaagtggggtcccatcacgtttcagtggcagtggatctgggacagatttcactctcaccatcagcagtctgcaacctgaagattttgctacatactactgtcatcagtatgagagtccacctttgacgttcggccaagggaccaaagtggaaatcaaacgg

SEQ ID NO: 1081 - DNA, 324 bp, Artificial Sequence
  Description of Artificial Sequence: Synthetic polynucleotide
gacatccagatgacccagtctccatcctccctgtctgcatctgtaggagaccgtgtcaccatcacttgccgggcaagtcagacgattgggcgtcgtttaaattggtatcagcagaaaccagggaaagcccctaagctcctgatctatcttgcttcccgtttgcaaagtggggtcccatcacgtttcagtggcagtggatctgggacagatttcactctcaccatcagcagtctgcaacctgaagattttgctacgtactactgtcatcagtatgagagtccacctttgacgttcggccaagggaccaaagtggaaatcaaacgg

SEQ ID NO: 1082 - DNA, 324 bp, Artificial Sequence
  Description of Artificial Sequence: Synthetic polynucleotide
gacatccagatgacccagtctccatcctccctgtctgcatctgtaggagaccgtgtcaccatcacttgccgggcaagtcagtcgattgagcgccgtttaaattggtatcagcagaaaccagggaaagcccctaagctcctgatctatcttgcttcccgtttgcaaagtggggtcccatcacgtttcagtggcagtggatctgggacagatttcactctcaccatcagcagtctgcaacctgaagattttgctacgtactactgtcatcagtatgagagtcctcctttgacgttcggccaagggaccaaagtggaaatcatacgg

SEQ ID NO: 1083 - DNA, 324 bp, Artificial Sequence
  Description of Artificial Sequence: Synthetic polynucleotide
gacatccagatgacccagtctccatcctccctgtctgcatctgtaggagaccgagtcaccatcacttgccgggcaagtcagacgattgagcgtcgtttaaattggtatcagcagaaacctgggaaagcccctaagctcctgatctatcttgctacccgtttgcaaagtggggtcccatcacgcttcagtggcagtggatctgggacagatttcactctcaccatcagcagtctgcaacctgaagattttgctacgtactactgtcatcagtatgagagtccacctttgacgttcggccaagggaccaaagtggaaatcaaacgg

SEQ ID NO: 1084 - DNA, 324 bp, Artificial Sequence
  Description of Artificial Sequence: Synthetic polynucleotide
gacatccagatgacccagtctccatcctccctgtctgcatctgtaggagaccgtgtcaccatcacttgccgggcaagtcagtcgattgagcgccgtttaaattggtatcagcagaaaccagggaaagcccctaagctcctgatctatcttgcttcccgtttgcaaagtggggtcccatcacgtttcagtggcagtggatctgggacagatttcactctcaccatcagcagtctgcaacctgaagattttgctacgtactactgtcatcagtatgagagtcctcctttgacgttcggccaagggaccaaagtggaaatcaaacgg

SEQ ID NO: 1085 - DNA, 324 bp, Artificial Sequence
  Description of Artificial Sequence: Synthetic polynucleotide
gacatccagatgacccagtctccatcctccctgtctgcatctgtaggagaccgagtcaccatcacttgccgggcaagtcagacgattgagcgtcgtttaaattggtatcagcagaaacctgggaaagcccctaggctcctgatctatcttgctacccgtttgcaaagtggggtcccatcacgcttcagtggcagtggatctgggacagatttcactctcaccatcagcagtctgcaacctgaagattttgctacgtactactgtcatcagttcgagcacccacctttgacgttcggccaagggaccaaagtggaaatcaaacgg

SEQ ID NO: 1086 - DNA, 324 bp, Artificial Sequence
  Description of Artificial Sequence: Synthetic polynucleotide
gacatccagatgacccagtctccatcctccctgtctgcatctgtaggagaccgagtcaccatcacttgccgggcaagtttccccattgaccgtcgtttaaattggtatcagcagaaacctgggaaagcccctaggctcctgatctatcttgctacccgtttgcaaagtggggtcccatcacgcttcagtggcagtggatctgggacagatttcactctcaccatcagcagtctgcaacctgaagattttgctacgtactactgtcatcagtatgagagtccacctttgacgttcggccaagggaccaaagtggaaatcaaacgg

SEQ ID NO: 1087 - DNA, 324 bp, Artificial Sequence
  Description of Artificial Sequence: Synthetic polynucleotide
gacatccagatgacccagtctccatcctccctgtctgcatctgtaggagaccgagtcaccatcacttgccgggcaagttccaccattggccgtcgtttaaattggtatcagcagaaacctgggaaagcccctaggctcctgatctatcttgctacccgtttgcaaagtggggtcccatcacgcttcagtggcagtggatctgggacagatttcactctcaccatcagcagtctgcaacctgaagattttgctacgtactactgtcatcagtatgagagtccacctttgacgttcggccaagggaccaaagtggaaatcaaacgg

SEQ ID NO: 1088 - DNA, 324 bp, Artificial Sequence
  Description of Artificial Sequence: Synthetic polynucleotide
gacatccagatgacccagtctccatcctccctgtctgcatctgtaggagaccgagttaccatcacttgccgggcaagttcccagattgggcgtcgtttaaattggtaccagcagaaaccagggaaagcccctaggctcctgatctatcttgctacccgtttgcaaagtggggtcccatcacgcttcagtggcagtggatctgggacagatttcactctcaccatcagcagtctgcaacctgaagattttgctacgtactactgtcatcagtatgagagtccacctttgacgttcggccaagggaccaaagtggaaatcaaacgg

SEQ ID NO: 1089 - DNA, 324 bp, Artificial Sequence
  Description of Artificial Sequence: Synthetic polynucleotide
gacatccagatgacccagtctccatcctccctgtctgcatctgtaggagaccgagtcaccatcacttgccgggcaagtgagcggattgggcgtcgtttaaattggtatcagcagaaaccagggaaagcccctaggctcctgatctatcttgctacccgtttgcaaagtggggtcccatcacgcttcagtggcagtggatctgggacagatttcactctcaccatcagcagtctgcaacctgaagattttgctacgtactactgtcatcagtatgagagtccacctttgacgttcggccaagggaccaaagtggaaatcaaacgg

SEQ ID NO: 1090 - DNA, 324 bp, Artificial Sequence
  Description of Artificial Sequence: Synthetic polynucleotide
gacatccagatgacccagtctccatcctccctgtctgcatctgtaggagaccgagtcaccatcacttgccgggcaagtcagcagattggccgccgtttaaattggtatcagcagaaacctgggaaagcccctaggctcctgatctatcttgctacccgtttgcaaagtggggtcccatcacgcttcagtggcagtggatctgggacagatttcactctcaccatcagcagtctgcaacctgaagattttgctacgtactactgtcatcagtatgagagtccacctttgacgttcggccaagggaccaaagtggaaatcaaacgg

SEQ ID NO: 1091 - DNA, 324 bp, Artificial Sequence
  Description of Artificial Sequence: Synthetic polynucleotide
gacatccagatgacccagtctccatcctccctgtctgcatctgtaggagaccgagtcaccatcacttgccgggcaagtcagccgattgcccggcgtttaaattggtaccagcagaaaccagggaaagcccctaggctcctgatctatcttgctacccgtttgcaaagtggggtcccatcacgcttcagtggcagtggatctgggacagatttcactctcaccatcagcagtctgcaacctgaagattttgctacgtactactgtcatcagtatgagagtccacctttgacgttcggccaagggaccaaagtggaaatcaaacgg

SEQ ID NO: 1092 - DNA, 324 bp, Artificial Sequence
  Description of Artificial Sequence: Synthetic polynucleotide
gacatccagatgacccagtctccatcctccctgtctgcatctgtaggagaccgagtcaccatcacttgccgggcaagtgggaacattggccgtcgtttaaattggtaccagcagaaaccagggaaagcccctaggctcctgatctatcttgctacccgtttgcaaagtggggtcccatcacgcttcagtggcagtggatctgggacagatttcactctcaccatcagcagtctgcaacctgaagattttgctacgtactactgtcatcagtatgagagtccacctttgacgttcggccaagggaccaaagtggaaatcaagcgg

SEQ ID NO: 1093 - DNA, 324 bp, Artificial Sequence
  Description of Artificial Sequence: Synthetic polynucleotide
gacatccagatgacccagtctccatcctccctgtctgcatctgtaggagaccgagtcaccatcacttgccgggcaagtcggaacattgaccgtcgtttaaattggtaccagcagaaaccagggaaagcccctaggctcctgatctatcttgctacccgtttgcaaagtggggtcccatcacgcttcagtggcagtggatctgggacagatttcactctcaccatcagcagtctgcaacctgaagattttgctacgtactactgtcatcagtatgagagtccacctttgacgttcggccaagggaccaaagtggaaatcaaacgg

SEQ ID NO: 1094 - DNA, 324 bp, Artificial Sequence
  Description of Artificial Sequence: Synthetic polynucleotide
gacatccagatgacccagtctccatcctccctgtctgcatctgtaggagaccgagtcaccatcacttgccgggcaagtcagagcattgggcgtcgtttaaattggtaccagcagaaacctgggaaagcccctaggctcctgatctatcttgctacccgtttgcaaagtggggtcccatcacgcttcagtggcagtggatctgggacagatttcactctcaccatcagcagtctgcaacctgaagattttgctacgtactactgtcatcagtatgagagtccacctttgacgttcggccaagggaccaaagtggaaatcaaacgg

SEQ ID NO: 1095 - DNA, 324 bp, Artificial Sequence
  Description of Artificial Sequence: Synthetic polynucleotide
gacatccagatgacccagtctccatcctccctgtctgcatctgtaggagaccgagtcaccatcacttgccgggcaagtcagaacattgggacgcgtttaaattggtaccagcagaaaccagggaaagcccctaggctcctgatctatcttgctacccgtttgcaaagtggggtcccatcacgcttcagtggcagtggatctgggacagatttcactctcaccatcagcagtctgcaacctgaagattttgctacgtactactgtcatcagtatgagagtccacctttgacgttcggccaagggaccaaagtggaaatcaaacgg

SEQ ID NO: 1096 - DNA, 324 bp, Artificial Sequence
  Description of Artificial Sequence: Synthetic polynucleotide
gacatccagatgacccagtctccatcctccctgtctgcatctgtaggagaccgagtcaccatcacttgccgggcaagtgaggtcattgggcgtcgtttaaattggtaccagcagaaaccagggaaagcccctaggctcctgatctatcttgctacccgtttgcaaagtggggtcccatcacgcttcagtggcagtggatctgggacagatttcactctcaccatcagcagtctgcaacctgaagattttgctacgtactactgtcatcagtatgagagtccacctttgacgttcggccaagggaccaaagtggaaatcaaacgg

SEQ ID NO: 1097 - DNA, 324 bp, Artificial Sequence
  Description of Artificial Sequence: Synthetic polynucleotide
gacatccagatgacccagtctccatcctccctgtctgcatctgtaggagaccgagtcaccatcacttgccgggcaagtgaggcgattggccgtcgtttaaattggtatcagcagaaaccagggaaagcccctaggctcctgatctatcttgctacccgtttgcaaagtggggtcccatcacgcttcagtggcagtggatctgggacagatttcactctcaccatcagcagtctgcaacctgaagattttgctacgtactactgtcatcagtatgagagtccacctttgacgttcggccaagggaccaaagtggaaatcaaacgg

SEQ ID NO: 1098 - DNA, 324 bp, Artificial Sequence
  Description of Artificial Sequence: Synthetic polynucleotide
gacatccagatgacccagtctccatcctccctgtctgcatctgtaggagaccgagtcaccatcacttgccgggcaagtaccagcattgcgcgtcgtttaaattggtatcagcagaaacctgggaaagcccctaggctcctgatctatcttgctacccgtttgcaaagtggggtcccatcacgcttcagtggcagtggatctgggacagatttcactctcaccatcagcagtctgcaacctgaagattttgctacgtactactgtcatcagtatgagagtccacctttgacgttcggccaagggaccaaagtggaaatcaaacgg

SEQ ID NO: 1099 - DNA, 324 bp, Artificial Sequence
  Description of Artificial Sequence: Synthetic polynucleotide
gacatccagatgacccagtctccatcctccctgtctgcatctgtaggagaccgagtcaccatcacttgccgggcaagtttgaacattgggcgtcgtttaaattggtaccagcagaaaccagggaaagcccctaggctcctgatctatcttgctacccgtttgcaaagtggggtcccatcacgcttcagtggcagtggatctgggacagatttcactctcaccatcagcagtctgcaacctgaagattttgctacgtactactgtcatcagtatgagagtccacctttgacgttcggccaagggaccaaagtggaaatcaaacgg

SEQ ID NO: 1100 - DNA, 324 bp, Artificial Sequence
  Description of Artificial Sequence: Synthetic polynucleotide
gacatccagatgacccagtctccatcctccctgtctgcatctgtaggagaccgagtcaccatcacttgccgggcaagtcagacgattgagcgtcgtttaaattggtaccagcagaaaccagggaaagcccctaggctcctgatctatctttcgtcgaagttgcaaagtggggtcccatcacgcttcagtggcagtggatctgggacagatttcactctcaccatcagcagtctgcaacctgaagattttgctacgtactactgtcatcagtatgagagtccacctttgacgttcggccaagggaccaaagtggaaatcaaacgg

SEQ ID NO: 1101 - DNA, 348 bp, Artificial Sequence
  Description of Artificial Sequence: Synthetic polynucleotide
gaggtgcagctgttggagtctgggggaggcttggttcagcctggggggtccctgcgtctctcctgtgcagcctccggatccaccattgctgggtatgagatgtggtgggtccgccaggctccagggaagggtctagagcgtgtctcagctattagtggtagtggtggtagcacatactacgcagactccgtgaagggccggttcaccatctcccgagacgattccaagaacacgctgtatctgcaaatgaacagcctgcgtgccgaggataccgcggtatattactgtgcgagagatccttatagttttgactactggggtcagggaaccctggtcaccgtctcgagc

SEQ ID NO: 1102 - DNA, 348 bp, Artificial Sequence
  Description of Artificial Sequence: Synthetic polynucleotide
gaggtgcagccgttggagtctgggggaggcttggtacagcctggggggtccctgcgtctctcctgtgcagcctccggattcacctttgctgggtatgagatgtggtgggtccgccaggctccagggaagggtctagagcggatctcagctattagcggtagtggtggtagcacatactacgcagactccgtgaagggccggttcaccatctcccgcgacgattccaagaacacgctgtatctgcaaatgaacagcctgcgtgccgaggataccgcggtatattactgtgcgagagatccttatagttttgactactggggtcagggaaccctggtcaccgtctcgagc

SEQ ID NO: 1103 - DNA, 348 bp, Artificial Sequence
  Description of Artificial Sequence: Synthetic polynucleotide
gaggtgcagctgttggagtctgggggaggctcggtacagcctggggggtccctgcgtctctcctgtgcagccaccggatccacctttgctgggtatgagatgtggtgggtccgccaggctccagggaagggtctagagcgggtctcagctattagtggtagtggtggtagcacatactacgcagactccgtgaagggccggttcaccatctcccgcgacgattccaagaacacgctgtatctgcaaatgaacagcctgcgtgccgaggataccgcggtatattactgtgcgagagatccttacagttatgactactggggtcagggaaccctggtctccgtctcgagc

SEQ ID NO: 1104 - DNA, 348 bp, Artificial Sequence
  Description of Artificial Sequence: Synthetic polynucleotide
gaggtgcagctgttggagtctgggggaggcttggtacagcctggggggtccctgcgtctctcctgtgcagcctccggactcacctttgctgggtatgagatgtggtgggtccgccaggcaccagggaagggtctagagcgggtctcagctattagtggtagtggtggtagcacatactacgcagactccgtgaagggccggttcaccatctcccgcgacgattccaagaacacgctgtatctgcaaatgaacagcctgcgtgccgaggataccgcagtatatcactgtgcgagagatccttatagttttgactactggggtcagggaaccctggtcaccgtctcgagc

SEQ ID NO: 1105 - DNA, 348 bp, Artificial Sequence
  Description of Artificial Sequence: Synthetic polynucleotide
gaggtgcagctgttggagtctgggggaggcttggtacagcctggggggtccctgcgtctctcctgtgcagcctccggattcacctttgctgggtatgagatgtggtgggtccgccaggctccagggaagggtctagagcgggtctcagctattagtggtagtggtggtagcacatactacgcagactctgtgaagggccggttcaccatctcccgcgacgattccaagaacacgctgtatctgcaaatgaacagcctgcgtgccgaggataccgcggtatatcactgtgcgaaagaaccttatagttatgactactggggtcagggaaccctggtcaccgtctcgagc

SEQ ID NO: 1106 - DNA, 348 bp, Artificial Sequence
  Description of Artificial Sequence: Synthetic polynucleotide
gaggtgcagctgttggagtctgggggaggcttggtacagcctggggggtccctgcgtctctcctgtgcagcctccggatccacctttgctgggtatgagatgtggtgggtccgccaggctccagggaagggtctagagcgggtctcagctattagtggtagtggtggtagcacatactacgcagactccgtgaagggccggttcaccatctcccgcgacgattccaagaacacgctgtatctgcaaatgaacagcctgcgtcccgaggataccgcggtatattactgtgtgaaagatccttatagttttgactactggggtcagggaaccctggtcaccgtctcgagc

SEQ ID NO: 1107 - DNA, 348 bp, Artificial Sequence
  Description of Artificial Sequence: Synthetic polynucleotide
gaggtgcagctgttggagtctgggggaggcttggtacagcctggggggtccctgcgtctctcctgtgcagcctccggatccaccattgccgggtatgagatgtggtgggtccgccaggctccggggaagggtctagagcgggtctcagctattagtggtagtggtggtagcacatactacgcagactccgtgaagggccggttcaccatctcccgcgacgattccaagaacacgctgtatctgcaaatgaacagcctgcgtgccgaggataccgcggtatattactgtgcgagagatccttatagttttgactactggggtcagggaaccccggtcaccgtctcgagc

SEQ ID NO: 1108 - DNA, 348 bp, Artificial Sequence
  Description of Artificial Sequence: Synthetic polynucleotide
gaggtgcagctgatggagtctgggggaggcttggtacagcctggggggtccctgcgtctctcctgtgcagcctccggatccacctttgctgggtatgagatgtggtggtaccgccaggctccagggaagggtctagagcgggtctcagctattagtggaagtggtagaagcacatactacgcagactccgtgaagggccggttcaccatctcccgcgacgattccaagaacacgctgtatctgcaaatgaacagcctgcgtgccgaggataccgcggtatattactgtgcgaaagatccttatagttttgactactggggtcagggaaccctggtcaccgtctcgagc

SEQ ID NO: 1109 - DNA, 348 bp, Artificial Sequence
  Description of Artificial Sequence: Synthetic polynucleotide
gaggtgcagctgctggagtctgggggaggcttggtacagcctggggggtccctgcgtctctcctgtgcagcctccggattcacctttgctgggtatgagatgtggtgggtccgccaggctccagggaagggtctagagcgggtctcagctattagtggtagtggtggtagcacgtactacgcagactccgtgaagggccggttcaccatctcccgcgacgattccaagaacacgctgtatctgcaaatgaacagcctgcgtgccgaggataccgcagtatattactgtgcgaaagaaccttatagttttgactactggggtcagggaaccctggtcaccgtctcgagc

SEQ ID NO: 1110 - DNA, 348 bp, Artificial Sequence
  Description of Artificial Sequence: Synthetic polynucleotide
gaggtgcagctgttggagtctgggggaggcttggtacagcctggggggtccctgcgtctctcctgtgcagcctccggatccaccattgctgggtatgagatgtggtgggtccgccaggctccagggaagggtctagagcgggtctcagctattagtggtagtggtggtagcacatactacgcagactccgtgaagggccggttcaccatctcccgcgacgattccaagaacacgctgtatctgcaaatgaacagcctgcgtgccgaggataccgcggtatattactgtgcgaaagatccatatagttttgactactggggtcagggaaccctggtcaccgtctcgagc

SEQ ID NO: 1111 - DNA, 348 bp, Artificial Sequence
  Description of Artificial Sequence: Synthetic polynucleotide
gaggtgcagctgttggagtctgggggaggcttggtacagcctggggggtccctgcgtctctcctgtgcagcctccggattcacctttgctgggtatgagatgtggtgggtccgccaggctccagggaagggtctagagcgggtctcagctattagtggtagtggtggtagcacatactacgcagactccgtgaagggccggttcaccatctcccgcgacgattccaagaacacgctgtatctgcaaatgaacagcctgcgtgccgaggataccgcggtatattactgtgcgagagacccttatagttttgactactggggtcagggaaccctggtctccgtctcgagc

SEQ ID NO: 1112 - DNA, 348 bp, Artificial Sequence
  Description of Artificial Sequence: Synthetic polynucleotide
gaggtgcagctgttggagtctgggggaggcttggtacagcctggggggtccctgcgtctctcctgtgcagcctccggattcaccattgctgggtatgagatgtggtgggtccgccaggctccagggaagggtctagagcgggtctccgctattagtggtagtggtggtagcacatactacgcggactccgtgaagggccggttcaccatctcccgcgacgattccaagaacacgctgtatctgcaaatgaacagcctgcgtgccgaggataccgcggtatattactgtgcgaaagatccttatagttttgactactggggtcagggaaccctggtcaccgtttcgagc

SEQ ID NO: 1113 - DNA, 348 bp, Artificial Sequence
  Description of Artificial Sequence: Synthetic polynucleotide
gaggtgcagctgttggagtctgggggaggcttggtacagcctggggggtccctgcgtctctcctgtgcagcctccggattcacctttgctgggtatgagatgtggtgggtccgccaggctccagggaagggtctagagcgtgtctcagctattagtggtagtggtggtagcacatactacgcagactccgtgaagggccggttcaccatcacccgcgacgattccaagaacacgctgtatctgcaaatgaacagcctgcgtgccgaggataccgcggtatattactgtgcgaaagagccttatagttttgactactggggtcagggaaccctggtcaccgtctcgagc

SEQ ID NO: 1114 - DNA, 348 bp, Artificial Sequence
  Description of Artificial Sequence: Synthetic polynucleotide
gaggtgcagctgttggagtctgggggaggcttggtacagcctggggggtccctgcgtctctcctgtgcagcctccggattcacctttgctgggtatgagatgtggtggttccgccaggctccagggaagggtctagagcgggtctcagctattagtggtagtggtggtagcacatactacgcagactccgtgaagggccggttcaccatctcccgcgacgataccaagaacacgctgtatctgcaaatgaacagcctgcgtgccgaggataccgcggtatattactgtgcgaaagatccttatagttttgactactggcgtcagggaaccctggtcaccgtctcgagc

SEQ ID NO: 1115 - DNA, 348 bp, Artificial Sequence
  Description of Artificial Sequence: Synthetic polynucleotide
gaggtgcagctgttggagtctgggggaggcttggtacagcctggggggtccctgcgtctctcctgtgcagcctccggatccacctttgctgggtatgaggtgtggtgggtccgccaggctccagggaagggtctggagcgggtctcagctattagtggtagtggtggtagcacatactacgcagactccgtgaagggccggttcaccatctcccgcgacgattccaagaacacgctgtatctgcaaatgaacagcctgcgtgccgaggataccgcggtatattactgtgcgagagatccttatagttttgactactggggtcagggaaccctggtcaccgtctcgagc

SEQ ID NO: 1116 - DNA, 348 bp, Artificial Sequence
  Description of Artificial Sequence: Synthetic polynucleotide
gaggtgcagctgttggagtctgggggaggcttggtacagcctggggggtccctgcgtctctcctgtgcagcctccggatccacctttgctgggtatgagatgtggtgggtccgccaggctccagggaagggtctagagcggatctcagctattagtggtagtggtggtagcacatactacgcagactccgtgaagggccggttcaccatctcccgcgacgattccaagaacacgctgtatctgaaaatgaacagcctgcgtgccgaggataccgcggtatattactgtgcgaaagatccttatagttttgactactggggtcagggaaccctggtcaccgtctcgagc

SEQ ID NO: 1117 - DNA, 348 bp, Artificial Sequence
  Description of Artificial Sequence: Synthetic polynucleotide
gaggtgcagctgttggagtctgggggaggcttggtacagcctggggggtccctgcgtctctcctgtgcagcctccggattcacctttgctgggtatgagatgtggtgggtccgccaggctccagggaagggtctagagcgggtctcagctattagtggtagtggtggtagcacatactacgcagactccgtgaagggccggttcaccatctcccgcgacgattccaagaacacgctgtatctgcaaatgaacagcctgcgtgccgaggataccgcggtatattactgtgcgagagatccttatagttttgactactggggtcagggaaccctggtcaccgtctcgagc

SEQ ID NO: 1118 - DNA, 348 bp, Artificial Sequence
  Description of Artificial Sequence: Synthetic polynucleotide
gaggtgcagctgttggagtctgggggaggcttggtacagcctggggggtccctgcgtctctcctgtgcagcctccggactcacctttgctgggtatgagatgtggtgggtccgccgggctccagggaagggtctagagcgggtcgcagctattagtggtagtggtggtagcacatactacgcagactccgtgaagggccggttcaccatctcccgcgacgattccaagaacacgctgtatctgcaaatgaacagcctgcgtgccgaggataccgcggtatattactgtgcgagagatccttatagttttgactactggggtcagggaaccctggtcaccgtctcgagc

SEQ ID NO: 1119 - DNA, 348 bp, Artificial Sequence
  Description of Artificial Sequence: Synthetic polynucleotide
gaggtgcagctgttggagtctgggggaggcttggtacagcctggggggtccctgcgtctctcctgtgcagcctccggattcacctttgctgggtatgagttgtggtgggtccgccaggccccagggaagggtctagagcgggtctcagctattagtggaagtggtggtagcacatactacgcagactccgtgaagggccggttcaccatctcccgcgacgattccaagaacacgctgtatctgcaaatgaacagcctgcgtgccgaggataccgcggtatattactgtgcgagagatccttatagttttgactaccggggtcagggaaccctggtcaccgtctcgagc

SEQ ID NO: 1120 - DNA, 348 bp, Artificial Sequence
  Description of Artificial Sequence: Synthetic polynucleotide
gaggtgcagctgttggagtctgggggaggcttggtacagcctggggggtccctgcgtctctcctgtgcagcccccggattcaccttagctgggtatgagatgtggtgggtccgccaggctccagggaagggtctagagcgggtctcagctattagtggtagtggtggtagcacatactacgcagactccgtgaagggccggttcaccatctcccgcgacgattccaagaacacgctgtatctgcaaatgaacagcctgcgtgccgaggataccgcggtatattactgtgcgaaagaaccttatagttttgactactggggtcagggaaccctggtcaccgtctcgagc

SEQ ID NO: 1121 - DNA, 348 bp, Artificial Sequence
  Description of Artificial Sequence: Synthetic polynucleotide
gaggtgcagctgttggagtctgggggaggcttggtacagcctggggggtccctgcgtctctcctgtgcagcctccggactcacctttgctgggtatgagatgtggtgggtccgtcgggctccagggaagggtctagagcgggtctcagctattagtggtagtggtggtagcacatactacgcagactccgtgaagggccggttcaccacctcccgcgacgattccaagaacacgctgtatctgcaaatgaacagcctgcgtgccgaggataccgcggtatattactgtgcgagagatccttatagttttgactactggggtcggggaaccctggtcaccgtctcgagc

SEQ ID NO: 1122 - DNA, 348 bp, Artificial Sequence
  Description of Artificial Sequence: Synthetic polynucleotide
gaggtgcagctgttggagtctgggggaggcttggtacagcccggggggtccctgcgtctctcctgtgccgcctccggattcacctttgctgggtatgagatgtggtgggtccgccaggctccagggaagggtctagagcgggtctcagctattagtggtagcggtggtagcacatactacgcagactccgtgaagggccggttcaccatctcccgcgacgattccaagaacacgctgtatctgcaaatgaacagcctgcgtgccgaggataccgcggtatattactgtgcgaaagaaccttatagttatgactactggggtcatggaaccctggttactgtctcgagc

SEQ ID NO: 1123 - DNA, 348 bp, Artificial Sequence
  Description of Artificial Sequence: Synthetic polynucleotide
gaggtgcagccgttggagtctgggggaggcttggtacagcctggggggtccctgcgtctctcctgtgcagcctccggattcacctttgctgggtatgagatgtggtgggtccgccaggctccagggaagggtctagagcgggtctcagctattagtggtagtggtggtaacacatactacgcagactccgtgaagggccggttcaccatctcccgcgacgattccaagaacacgctgtatctgcaaatgaacagcctgcgtgccgaggataccggggtatattactgtgcgagagatccttatagttttgactactggggtcagggtaccctggtcaccgtctcgagc

SEQ ID NO: 1124 - DNA, 348 bp, Artificial Sequence
  Description of Artificial Sequence: Synthetic polynucleotide
gaggtgcagctgttggagtctgggggaggcttggtacagcctggggggtccctgcgtctctcctgtgcagcctccggattcacctttgctgggtatgagatgtggtgggtccgccaggctccagggaagggtctagagcgggtctcagctattagtggtagtggtggtagcacatactacgcagactccgtgaagggccggttcaccatctcccgcgacgattccaagaacacgctgtatctgcaaatgaacagcctgcgtgccgaggataccgcggtatattactgtgcgaaagaaccttatagttttgactcctggggtcagggaaccctggtcaccgtctcgagc

SEQ ID NO: 1125 - DNA, 348 bp, Artificial Sequence
  Description of Artificial Sequence: Synthetic polynucleotide
gaggcgcagctgttggagtctgggggaggcttggtacagcctggggggtccctgcgtctctcctgtgcagcctccggattaaccttcgctgggtatgagatgtggtgggtccgccaggctccagggaagggtctagagcgcgtctcagctattagtggtagtggcggtagcacatactacgcagactccgtgaagggccggttcaccatctcccgcgacgattccaagaacacgctgtatctgcaaatgaacagcctgcgtgccgaggataccgcggtatattactgtgcgagagatccttatagttttgactactggggtcagggaaccctggtcaccgtctcgagc

SEQ ID NO: 1126 - DNA, 348 bp, Artificial Sequence
  Description of Artificial Sequence: Synthetic polynucleotide
gaggtgcagctgttggagtctgggggaggcttggtacagcctggggggtccctgcgtctctcctgtgcagcctccggatccacctttgctgggtatgagatgtggtgggtccgccaggctccagggaagggtctagagcgggtctcagctattagtggtagtggtggtagcacatactacgcagactccgtgaagggccggttctccatctcccgcgacgattccaagaacacgctgtatctgcaaatgaacagcctgcgtgccgaggataccgcggtatattactgtgcgaaagaaccttatagttttgaccactggggtcagggaaccctggtcaccgtctcgagc

SEQ ID NO: 1127 - DNA, 348 bp, Artificial Sequence
  Description of Artificial Sequence: Synthetic polynucleotide
gaggtgcagctgttggagtctgggggaggcttggtacagcctggggggtccctgcgtctctcctgtgcagcctcgggatccacctttgctgggtatgagatgtggtgggtccgcagggctccagggaagggtctagagcgggtctcagctattagtggtagtggtggtagcacatactacgcagactccgtgaagggccggttcaccatctcccgcgacgattccaagaacacgctgtatctgcaaatgaacagcctgcgtgccgaggataccgcggtatattactgtgcgagagatccttatagttttgactactggggtcagggaaccctggtcaccgtctcgagc

SEQ ID NO: 1128 - DNA, 348 bp, Artificial Sequence
  Description of Artificial Sequence: Synthetic polynucleotide
gaggtgcagctgttggagtctgggggaggcttggtacagcctggggggtccctgcgtctctcctgtgcagcctccggattcacctttgctgggtatgagatgtggtggttccgccaggctccagggaagggtctagagcgggtctcagctattagtggtagtggtggtagcacatactacgcagactccgtgaagggccggttcaccatctcccgcgacgattccaagaacacgctgtatctgcaaatgaacagcctgcgtgccgaggataccgcggtatattactgtgcgaaagatccttatagttttgacaactggggtcagggaaccctggtcaccgtctcgagc

SEQ ID NO: 1129 - DNA, 348 bp, Artificial Sequence
  Description of Artificial Sequence: Synthetic polynucleotide
gaggtgcagctgttggagtctgggggaggcttggtagagcctggggggtccctgcgtctctcctgtgcagcctccggattcacctttgctgggtatgagatgtggtgggtccgccaggctccagggaagggtctagagcgggtctcagctattagtggtagtggtggtagcacatactacgcagactccgtgaagggccggttcaccatctcccgcgacgattccaagaacacgctgtatctgcaaatgaacagcctgcgtgccgaggataccgcggtatattactgtgcgaaagaaccttatagttttgaccaccggggtcagggaaccctggtcaccgtctcgagc

SEQ ID NO: 1130 - DNA, 348 bp, Artificial Sequence
  Description of Artificial Sequence: Synthetic polynucleotide
gaggtgcagctgttggagtctgggggaggcttggtacagcctggggggtccctgcgtctctcctgtgcagcctccggatacacctttgctgggtatgagatgtggtgggtccgccaggctccagggaagggtctagagcgggtctcagctattagtggtagtggtggtagcacatactacgcagactccgtgaagggccggttcaccatctcccgcgacgattccaagaacacgctgtatctgcaaatgaacagcctgcgtgccgaggataccgcggtatattactgtgcgaaagaaccttatagttttgaccaccggggtcagggaaccctggtcaccgtctcgagc

SEQ ID NO: 1131 - DNA, 348 bp, Artificial Sequence
  Description of Artificial Sequence: Synthetic polynucleotide
gaggtgcagctgttggagtctgggggaggcttggtacagcctggggggtccctgcgtctctcctgtgcagcctccggattcacctttgctgggtatgagatgtggtgggtccgccaggctccagggaagggtctagagcgggtctcagctattagtggtagtggtggtagcacatactacgcagactctgtgaagggccggttcaccatctcccgcgacaattccaagaacacgctgtatctgcaaatgaacagcctgcgtgccgaggataccgcggtatatcactgtgcgaaagaaccttatagttatgactactggggtcagggaaccctggtcaccgtctcgagc

SEQ ID NO: 1132 - DNA, 348 bp, Artificial Sequence
  Description of Artificial Sequence: Synthetic polynucleotide
gaggtgcagctgttggagtctgggggaggcttggtacagcctggggggtccctgcgtctctcctgtgcagcctccggattcacctttgctgggtatgagatgtggtggttccgccaggctccagggaagggtctagagcgggtctcagctattagtggtagtggtggtagcacatactacgcagactccgtgaagggccggttcaccatctcccgcgacaattccaagaacacgctgtatctgcaaatgaacagcctgcgtgccgaggataccgcggtatattactgtgcgaaagatccttatagttttgacaactggggtcagggaaccctggtcaccgtctcgagc

SEQ ID NO: 1133 - DNA, 348 bp, Artificial Sequence
  Description of Artificial Sequence: Synthetic polynucleotide
gaggtgcagctgttggagtctgggggaggcttggtacagcctggggggtccctgcgtctctcctgtgcagcctccggattcacctttgctgggtatgagatgtggtgggtccgccaggctccagggaagggtctagagcgggtctcagctattagtggtagtggtggtagcacatactacgcagactctgtgaagggccggttcaccatctcccgcgacgattccaagaacacgctgtatctgcaaatgaacagcctgcgtgccgaggataccgcggtatattactgtgcgaaagaaccttatagttatgactactggggtcagggaaccctggtcaccgtctcgagc

SEQ ID NO: 1134 - DNA, 348 bp, Artificial Sequence
  Description of Artificial Sequence: Synthetic polynucleotide
gaggtgcagctgttggagtctgggggaggcttggtacagcctggggggtccctgcgtctctcctgtgcagcctccggattcacctttgctgggtatgagatgtggtgggtccgccaggctcccgggaagggtctagagcgggtctcagctattagtggtagtggtggtagcacatactacgcagactccgtgaagggccggttcaccatctcccgcgacgattccaagaacacgctgtatctgcaaatgaacagcctgcgtgccgaggataccgcggtatattactgtgcgaaagatccttatagttttgacaactggggtcagggaaccctggtcaccgtctcgagc

SEQ ID NO: 1135 - DNA, 348 bp, Artificial Sequence
  Description of Artificial Sequence: Synthetic polynucleotide
gaggtgcagctgttggagtctgggggaggcttggtacagcctggggggtccctgcgtctctcctgtgcagcctccggattcacctttgctgggtatgagatgtggtgggtccgccaggctccagggaagggtctagagtgggtctcagctattagtggtagtggtggtagcacatactacgcagactctgtgaagggccggttcaccatctcccgcgacgattccaagaacacgctgtatctgcaaatgaacagcctgcgtgccgaggataccgcggtatatcactgtgcgaaagaaccttatagttatgactactggggtcagggaaccctggtcaccgtctcgagc

SEQ ID NO: 1136 - DNA, 348 bp, Artificial Sequence
  Description of Artificial Sequence: Synthetic polynucleotide
gaggtgcagctgttggagtctgggggaggcttggtacagcctggggggtccctgcgtctctcctgtgcagcctccggattcacctttgctgggtatgagatgtggtggttccgccaggctccagggaagggtctagagtgggtctcagctattagtggtagtggtggtagcacatactacgcagactccgtgaagggccggttcaccatctcccgcgacgattccaagaacacgctgtatctgcaaatgaacagcctgcgtgccgaggataccgcggtatattactgtgcgaaagatccttatagttttgacaactggggtcagggaaccctggtcaccgtctcgagc

SEQ ID NO: 1137 - DNA, 348 bp, Artificial Sequence
  Description of Artificial Sequence: Synthetic polynucleotide
gaggtgcagctgttggagtctgggggaggcttggtacagcctggggggtccctgcgtctctcctgtgcagcctccggattcacctttgctgggtatgagttgtggtgggtccgccaggccccagggaagggtctagagcgggtctcagctattagtggaagtggtggtagcacatactacgcagactccgtgaagggccggttcaccatctcccgcgacgattccaagaacacgctgtatctgcaaatgaacagcctgcgtgccgaggataccgcggtatattactgtgcgaaagatccttatagttttgactaccggggtcagggaaccctggtcaccgtctcgagc

SEQ ID NO: 1138 - DNA, 348 bp, Artificial Sequence
  Description of Artificial Sequence: Synthetic polynucleotide
gaggtgcagctgttggagtctgggggaggcttggtacagcctggggggtccctgcgtctctcctgtgcagcctccggattcacctttgctgggtatgagttgtggtgggtccgccaggccccagggaagggtctagagcgggtctcagctattagtggaagtggtggtagcacatactacgcagactccgtgaagggccggttcaccatctcccgcgacgattccaagaacacgctgtatctgcaaatgaacagcctgcgtgccgaggataccgcggtatattactgtgcgagagatccttatagttttgactactggggtcagggaaccctggtcaccgtctcgagc

SEQ ID NO: 1139 - DNA, 360 bp, Artificial Sequence
  Description of Artificial Sequence: Synthetic polynucleotide
gaggtgcagctgttggagtctggggggggcttggtacagcctggggggtccctgcgtctctcctgtgcagcctccggattcacctttccgactgctgagatgctgtgggtccgcaaggctccagggaagggtctagagtgggtctcatctatttcggctagtggtggttctacatactacgcagactccgtgaagggccggttcaccatctcccgcgacaattccaagaacacgctgtatctgcaaatgaacagcctgcgtgccgaggacaccgcggtatattactgtgcgaaagagccggtgagttatgtggcgacgtttgactactggggtcagggaaccctggtcaccgtctcgagc

SEQ ID NO: 1140 - DNA, 360 bp, Artificial Sequence
  Description of Artificial Sequence: Synthetic polynucleotide
gaggtgcagctgttggtgtctgggggaggcttggtacagcctggggggtccctgcgtctctcctgtgcagcctccggattcacctttccgactgctgagatgttgtgggtccgccaggctccagggaagggtccagagtgggtctcatcaatttcggctagtggtggttctacatactatgcagactccgtgaagggccggttcaccatctcccgcgacaattccaagaacacgctgtatctgcaaatgaacagcctgcgtgccgaggacaccgcggtatattactgtgcgaaagagccggtgagttatgtggcgacgtttgactactggggtcagggaaccctggtcaccgtctcgagc

SEQ ID NO: 1141 - DNA, 360 bp, Artificial Sequence
  Description of Artificial Sequence: Synthetic polynucleotide
gaggtgcagctgttggagtctgggggaggcttggtacagcctggggggtccctgcgtctctcgtgtgcagcctccggattcacctttccgactgccgagatggtgtgggtccgcaaggctccagggatgggtctagagtgggtctcatctatttcggctagtggtggttatacatactacgcagactccgtgaagggccggttcaccatctcccgcgacaattccaagaacatgctgtatctgcaaatgaacagcctgcgtgccgaggacaccgcggtatattactgtgcgaaagagccggtgagttatgtggcgacgtttgactactggggtcagggagccctggtcaccgtcacgagc

SEQ ID NO: 1142 - DNA, 360 bp, Artificial Sequence
  Description of Artificial Sequence: Synthetic polynucleotide
gaggtgcagctgttggtgtctgggggaggcttggtacagcctggggggtccctgcgtctctcctgtgcagcctccggattcacctttccgactgctgagatggtgtgggtccgccaggctccagggaagggtctagagtgggtctcatctatttcggctagtggtggttctacatactacgcagactccgtgaagggccggttctccatctcccgcgacgattccaagaacacgctgtatctgcaaatgaacagcctgcgtgccgaggacaccgcggtatattactgtgcgaaagagccggtgagttatgtggcgacgtttgactactggggtcatggagccctggtcaccgtctcgagc

SEQ ID NO: 1143 - DNA, 360 bp, Artificial Sequence
  Description of Artificial Sequence: Synthetic polynucleotide
gaggtgcagctgttggagtctgggggaggcttggtacagcctggggggtccctgcgtctctcctgtgcagcctccggattcacatttccgactgctgagatgttgtgggtccgccaggctccagggaagggtctagagtgggtctcatctatttcggctagtggtggttctacatactacgcagactccgtgaagggccggttcaccatctcccgcgacaattccaagaacacgctgtatctgcaaatgaacagcctgcgagccgaggacaccgcggtatattactgtgcgaaagagccggtgagttatgtggcaacgtttgactactggggtcagggaaccctggtcaccgtctcgagc

SEQ ID NO: 1144 - DNA, 360 bp, Artificial Sequence
  Description of Artificial Sequence: Synthetic polynucleotide
gaggcgcagctgttggagtctgggggtggcttggtacagcctggggggtccctgcgtctctcctgtgcagcctccggattcacctttccgactgctgagatggtgtgggtccgccaggctccagggaagggtctagagtggatctcatctatttcggctagtggtggttctacatactacgcagactccgtgaagggccggttcaccatctcccgcgacaattccaagaacacgctgtatctgcaattgaacagcctgcgtgccgaggacaccgcggtatattactgtgcgaaagagccggtgagttatgtggcgacgtttgactactggggtcggggaaccctggtcaccgtctcgagc

SEQ ID NO: 1145 - DNA, 360 bp, Artificial Sequence
  Description of Artificial Sequence: Synthetic polynucleotide
gaggtgcagctgttggagtctgggggaggcttggtacagcctggggggtccctgcgtctctcctgtgcagcctccggattcacatttccgactgctgagatgttgtgggtccgccaggctccagggaagggtctagagtgggtctcatctatttcggctagtggtggttctacatactacgcagactccgtgaagggccggttcaccatctcccgcgacaattccaagagcacgctgtatctgcaaatgaacagcctgcgtgccgaggacaccgcggtatattactgtgcgaaagagccggtgagttatgtggcgacgtttgactactggggtccaggagccctggtcaccgtctcgagc

SEQ ID NO: 1146 - DNA, 360 bp, Artificial Sequence
  Description of Artificial Sequence: Synthetic polynucleotide
gaggtgcagctgttggagtccgggggaggcttggtacagcctggggggtccctgcgtctctcctgtgcagcctccggattcacctttccgactgctgagatgctgtgggtccgcaaggctccagggaagggtctagagtgggtctcatctatttcggctagtggtggttctacatactacgcagactccgtgaagggccggttcaccatctcccgcgacaattccaagaacacgctgtttctgcaaatgaacagcctgcgtgccgaggacaccgcggtatattactgtgccaaagagccggtgagttatgtggcgacgtttgactactggggtcagggaaccctggtcaccgtctcgagc

SEQ ID NO: 1147 - DNA, 360 bp, Artificial Sequence
  Description of Artificial Sequence: Synthetic polynucleotide
gaggtgcagctgttggagtctgggggaggcttggtacagcctggggggtccctgcgtctctcctgtgcagcctccggattcacatttccgactgctgagatgttgtgggtccgccaggctccagggaagggtctagagtgggtctcatctatttcggctagtggtggttctacatactacgcagactccgtgaagggccggttcaccatctcccgcgacaattccaagaacacgctgtatctgcaaatgaacagcctgcgtgccgaggacaccgcggtatattactgtgcgaaagagccggtgagttatgtggcgacgtttgactactggggtccaggagccctggtcaccgtctcgagc

SEQ ID NO: 1148 - DNA, 360 bp, Artificial Sequence
  Description of Artificial Sequence: Synthetic polynucleotide
gaggtgcagctgttggagtctgggggaggcttggtacagcctggggggtccctgcgtctctcctgtgcagcctccggattcacctttccgactgctgagatgctgtgggtccgccaggctccagggaagggtctagagtgggtctcatctatttcggctagtggtggttctacatactacgcagactccgtgaagggccggttcaccatctcccgcgacaattccaagaacacgctgtatttgcaaatgaacagcctgcgtgccgaggacaccgcggtatattactgtgcgaaagagccggtgtattatgtggcgacgtttgactactggggtcagggaaccctggtcaccgtctcgagc

SEQ ID NO: 1149 - DNA, 360 bp, Artificial Sequence
  Description of Artificial Sequence: Synthetic polynucleotide
gaggtgcagctgttggagtccgggggaggcttggtacagcctggggggtccctgcgtctctcctgtgcagcctccggattcacctttccgactgctgagatgctgtgggtccgcaaggctccagggaagggtctagagtgggtctcatctatttcggctagtggtggttctacatactacgcagactccgtgaagggccggttcaccatctcccgcgacaattccaagaacacgctgtatctgcaaatgaacagcctgcgtgccgaggacgccgcggtatattactgtgcgaaagagccggtgagttatgtggcgacgtttgactactggggtcagggaaccctggtcaccgtctcgagc

SEQ ID NO: 1150 - DNA, 324 bp, Artificial Sequence
  Description of Artificial Sequence: Synthetic polynucleotide
aacatccagatgacccagtctccatcctccctgtctgcatctgtaggagaccgtgtcaccatcacttgccgggcaagtcattttattggtactctgttaacttggtaccagcataaaccagggaaagcccctaagctcctgatcacttatggttccttgttgcaaagtggggtcccatcacgtttcagtggcagtggatctgggacagatttcactctcaccatcagcagtctgcaacctgaagattttgctacgtactactgtggtcagggggtgctgtggcctgcgacgttcggccaagggaccaaggtggaaatcaaacgg

SEQ ID NO: 1151 - DNA, 324 bp, Artificial Sequence
  Description of Artificial Sequence: Synthetic polynucleotide
gacatccagatgacccagtctccatcctccctgtctgcatctgtaggagaccgtgtcaccatcacttgccgggcaagtcattttattggtactctgttatcttggtaccagcagaaaccacggaaagcccctaaactcctgatcacttatggttccttgttgcaaagtggggtcccatcacgtttcagtggcagtggatctgggacagatttcactctcaccatcagcagtctgcatcctgaagattttgctacgtactactgtggtcagggggtgctgtggcctccgacgttcggtcaagggaccaaggtggaaatcaaacgg

SEQ ID NO: 1152 - DNA, 324 bp, Artificial Sequence
  Description of Artificial Sequence: Synthetic polynucleotide
gacatccagatgacccagtctccgtcctccctgactgcatctgtaggagaccgtgtcaccatcacttgccgggcaagtcattttattggtactctgttatcttggtaccagcagaaaccagggaaagcccctaagctcctggtcacttatggttccttgttgcaaagtggggtcccatcacgtttcagtggcagtggatctgggacagatttcactctcaccatcagcaatctgcaacctgaagattttgctacgtactactgtggtcagggggtgctgtggcctcctacgttcggccaagggaccaaggtggaaaacatacgg

SEQ ID NO: 1153 - DNA, 324 bp, Artificial Sequence
  Description of Artificial Sequence: Synthetic polynucleotide
gacatccagatgacccagtctccatcctccctgtctgcatctgtaggagaccgtgtcaccatcacttgccgggcaagtcattttattgctactctgttatcttggtaccagcagaaaccagggaaagcccctaagctcctgatcacttatggttccttgttgcaaagtggggtcccatcacgtttcagtggcagtggatctgggacagatttcactctcaccatcagcagtctgcaacctgaagattttgctacgtactactgtggtcagggggtgctgtggcctccgacgttcggccaagggaccaaggtggaaatcaaacgg

SEQ ID NO: 1154 - DNA, 324 bp, Artificial Sequence
  Description of Artificial Sequence: Synthetic polynucleotide
gacatccagatgacccagtctccatccttcctgtctgcatctgtaggagaccgtgtcaccatcacttgccgggcaagtcattttattgctactctgttatcttggtaccagcagaaaccagggaaagcccctaagctcctgatcacttatggttccttgttgcaaagtggggtcccatcacgtttcagtggcagtggatctgggacagatttcactctcaccatcagcagtctgcaacctgaagattttgctacgtactactgtggtcagggggtgctgtggcctccgacgttcggccaagggaccaaggtggaaatcaaacgg

SEQ ID NO: 1155 - DNA, 324 bp, Artificial Sequence
  Description of Artificial Sequence: Synthetic polynucleotide
gacatccagatgacccagtctccatcctccctgtctgcatctgtaggagaccgtgtcaccatcacttgccgggcaagtcattttattggtactctgttatcttggtaccagcagaaaccagggaaagccactaagctcctgatcacttatggttccttgttgcaaagtggggtcccatcacgtttcagtggcagtggatctgggacagatttcactctcaccatcagcagtctgcaacctgaagactttgctacgtactactgtggtcagggggtgctgtggcccccgacgttcggccaggggaccaaggtggaaatcaaacgt

SEQ ID NO: 1156 - DNA, 324 bp, Artificial Sequence
  Description of Artificial Sequence: Synthetic polynucleotide
gacatccagatgacccagtctccatcctccctgtctgcatctgtaggagaccgtgtcaccatcacttgccgggcaagtcattttattggttctctgttatcttggtaccagcataaaccagggaaagcccctaagctcctgatcacttatggttccttgttgcaaagtggggtcccatcacgtttcagtggcagtggatctgggacagatttcactctcaccatcagcagtctgcaacctgaagattttgctacgtactactgtggtcagggggtgctgtggcctgcgacgttcggccaagggaccaaggtggaaatcaaacgg

SEQ ID NO: 1157 - DNA, 324 bp, Artificial Sequence
  Description of Artificial Sequence: Synthetic polynucleotide
gacatccagatgacccagtctccatcctccctgtctgcatctgtaggagaccgtgtcaccatcacttgccgggcaagtcattttattggtactctgttatcttggtaccagcataaaccagggaaagcccctaagctcctgatcacttatggttccttgttgcaaagtggggtcccatcacgtttcagtggcagtggatctgggacagatttcactctcaccatcagcagtctgcaacctgaagattttgctacgtactactgtggtcagggggtgctgtggcctgcgacgttcggccaagggaccaaggtggaaatcaaacgg

SEQ ID NO: 1158 - DNA, 324 bp, Artificial Sequence
  Description of Artificial Sequence: Synthetic polynucleotide
gacatccagatgacccagtctccatcctccctgtctgcatctgtaggagaccgtgtcaccatcacttgccgggcaagtcattttattggtactctgttatcttggtaccagcataaaccagggaaagcccctaagctcctgatcacttatggttccatgttgcaaagtggggtcccatcacgtttcagtggcagtggatctgggacagatttcactctcaccatcagcagtctgcaacctgaagattttgcaacgtactactgtggtcagggggtgctgtggcctgcgacgttcggccaagggaccaaggtggaaatcaaacgg

SEQ ID NO: 1159 - DNA, 324 bp, Artificial Sequence
  Description of Artificial Sequence: Synthetic polynucleotide
gacatccagatgactcagtctccatcctccctgtctgcatctgtaggagaccgagtcaccatcacttgccgggcaagtcattttattggtactctgttatcctggtaccagcataaaccagggaaagcccctaagctcctgatcacctatggttccttgttgcaaagtggggtcccatcacgtttcagtggcagtggatctgggacagaattcactctcaccatcagcagtctgcaacctgaagattttgctacgtactactgtggtcagggagtgctgtggcctgcgacgttcggccaagggaccaaggtggaaatcaaacgg

SEQ ID NO: 1160 - DNA, 324 bp, Artificial Sequence
  Description of Artificial Sequence: Synthetic polynucleotide
gacatccagatgacccagtctccatcctccctgactgcatctgtaggagaccgtgtcaccatcacttgccgggcaagtcattttattggtactctgttatcttggtaccagcataaaccagggaaagcccctaagctcctgatcacttatggttccttgttgcaaagtggggtcccatcacgtttcagtggcagtggatctgggacagaattcactctcaccatcagcagtctgcaacctgaagattttgctacgtactactgtggtcagggggtgctgtggcctgcgacgttcggccaagggaccaaggtggaaatcaaacgg

SEQ ID NO: 1161 - DNA, 324 bp, Artificial Sequence
  Description of Artificial Sequence: Synthetic polynucleotide
aacatccagatgacccagtctccatcctccctgtctgcatctgtaggagaccgtgtcaccatcacttgccgggcaagtcattttattggtactctgttatcttggtaccagcataaaccagggaaagcccctaagctcctgatcacttatggttccttgttgcaaagtggggtcccatcacgtttcagtggcagtggatctgggacagatttcactctcaccatcagcagtctgcaacctgaagattttgctacgtactactgtggtcagggggtgctgtggcctgcgacgttcggccaagggaccaaggtggaaatcaaacgg

SEQ ID NO: 1162 - DNA, 324 bp, Artificial Sequence
  Description of Artificial Sequence: Synthetic polynucleotide
gacatccagatgacccagtctccatcctccctgtctgcatctgtaggagaccgtgtcaccatcaattgccgggcaagtcattttattggtactctgttatcttggtaccagcataaaccagggaaagcccctaagctcctgatcacttatggttccttgttgcaaagtggggtcccatcacgtttcagtggcagtggatctgggacagatttcactctcaccatcagcagtctgcaacctgaagattttgctacgtactactgtggtcagggggtgctgtggcctgcgacgttcggccaagggaccaaggtggaaatcaaacgg

SEQ ID NO: 1163 - DNA, 324 bp, Artificial Sequence
  Description of Artificial Sequence: Synthetic polynucleotide
gacatccagttgacccagtcaccatcctccctgtctgcatctgtaggagaccgtgtcaccatcacttgccgggcaagtcattttattggtactctgttatcttggtaccagcagaaaccagggaaagccactaagctcctgatcacttatggttccttgttgcaaagtggggtcccatcacgtttcagtggcagtggatctgggacagatttcactctcaccatcagcagtctgcaacctgaagattttgctacgtactactgtggtcagggggtgctgtggcctccgacgttcggccaagggaccaaggtggaaatcaaacgg

SEQ ID NO: 1164 - DNA, 324 bp, Artificial Sequence
  Description of Artificial Sequence: Synthetic polynucleotide
gacatccagatgacacagtctccatcctccctgtatgcatctgtaggagaccgtgtcaccatcacttgccgggtaagtcattttattggtactctgttatcttggtaccagcagaaaccagggaaagcccctaagctcctgatcacttatggttccttgttgcaaagtggggtcccatcacgtttcagtggcagtggatctgggacagatttcactctcagcatcagcagtctgcaacctgaagattttgctacgtactactgtggtcagggggtgctgtggcccccgacgttcggacaagggaccaaggtggaaatcaaacag

SEQ ID NO: 1165 - DNA, 324 bp, Artificial Sequence
  Description of Artificial Sequence: Synthetic polynucleotide
gacattcagatgacccagtctccatcctccctgtctgcatctgtaggagaccgtgtcaccatcacttgccgggcaagtcattttattggtactctgttatcttggtaccagcagaaaccaaggaaagcccctaagctcctgatcacttatggttccttgttgcaaagtggggtcccatcacgtttcagtggcagtggatctgggacagatttcactctcaccatcagcagtctgcaacctgaagattttgctacgtactactgtggtcagggggtgctgtggcctccgacgttcggccaagggaccaaggtggaaatcaaacgg

SEQ ID NO: 1166 - DNA, 324 bp, Artificial Sequence
  Description of Artificial Sequence: Synthetic polynucleotide
gacatccagattatccagtctccatcctccctttctgcatctgtaggagaccgtgtcaccatcacttgccgggcaagtcattttattggtactctgttatcttggtaccagcagaaaccagggaaagcccctaagctcctgatcacttatggttccttgttgcaaagtggggtcccatcacgtttcagtggcagtggatctgggacagatttcactctcaccatcagcagtctgcaacctgaagattttgctacgtactactgtggtcagggggtgctgtggcctccgacgttcggccaagggaccaaggtggaaatcaaacgg

SEQ ID NO: 1167 - DNA, 324 bp, Artificial Sequence
  Description of Artificial Sequence: Synthetic polynucleotide
gacatccagatgacccagtctccatcctccctgtctgcatctgtaggagaccgtgtcaccatcacttgccgggcaagtcattttattggtactctgttatcttggtaccagctgaaaccagggaaagcccctaagctcctgatcacttatggttccttgttgcaaagtggggtcccatcacgtttcagtggcagtggatctgggacagatttcactctcaccatcagcagtctgcaacctgaagattttgctacgtactactgtggtcagggggtgctgtggcctgcgacgttcggccaagggaccaaggtggaaatcaaacgg

SEQ ID NO: 1168 - DNA, 324 bp, Artificial Sequence
  Description of Artificial Sequence: Synthetic polynucleotide
gacatccagatgacccagtctccatcctccctgtctgcatctgtaggagaccgtgtcaccatcacttgccgggcaagtcattttattggtactctgttatcttggtaccagctgaaaccagggaaagccccaaagctcctgatcacttatggttcctggttgcaaagtggggtcccatcacgtttcagtggcagtggatctgggacagatttcactctcaccatcagcagtctgcaacctgaagattttgctacgtactactgtggtcagggggtgctgtggcctgcgacgttcggccaagggaccaaggtagaaaacaaacgg

SEQ ID NO: 1169 - DNA, 324 bp, Artificial Sequence
  Description of Artificial Sequence: Synthetic polynucleotide
gacatccagatgacccagtctccatcctccctgtctgcatctgtaggagaccgtgtcaccatcacttgccgggcaagtcattttattggtactctgttatcttggtaccagcttaaaccagggaaagcccctaagctcctgatcacttatggttccttgttgcaacgtggggtcccatcacgtttcagtggcagtggatctgggacagatttcactctcaccatcagcagtctgcaacctgaagattttgctacgtactactgtggtcagggggtgctgtggcctgcgacgttcggccaagggaccaaggtggaaatcaaacgg

SEQ ID NO: 1170 - DNA, 324 bp, Artificial Sequence
  Description of Artificial Sequence: Synthetic polynucleotide
gacatccagatgacccaggctccatcctccctgtctgcatctgtaggagaccgtgtcaccatcacttgccgggcaagtcattttattggtactctgttatcttggtaccagctgaaaccagggaaagcccctaagctcctgatcacttatggttccttgttgcagagtggggtcccatcacgtttcagtggtagtggatctgggacagatttcactctcaccatcagcagtctgcaacctgaagattttgctacgtactactgtggtcagggggtgctgtggcctgcgacgttcggccaagggaccaaggttgaaaacaaacgg

SEQ ID NO: 1171 - DNA, 324 bp, Artificial Sequence
  Description of Artificial Sequence: Synthetic polynucleotide
gacatccagatgacccagtctccatcctccctgtctgcatctgtaggagaccgtgtcaccatcacttgccgggcaagtcattttattggttctctgttatcttggtaccagcagaaaccagggaaagccccaaagctcctgatcacttatggttccttgttgcaaagtggggtcccatcacgtttcagtggcagtggatctgggacagatttcgctctcaccatcagcagtctgcaacctgaagattttgctacgtactactgtggtcagggggtgctgtggcctgcgacgttcggccaagggaccaaggtggaaatcaaacgg

SEQ ID NO: 1172 - DNA, 324 bp, Artificial Sequence
  Description of Artificial Sequence: Synthetic polynucleotide
gacatccagatgacccagtctccatcctccctgtctgcatctgtaggagaccgtgtcaccatcacttgccgggcaagtcattttattggtagtctgttatcttggtaccaggtgaaaccagggaaagcccctaagctcctgatcacttatggttccttgttgcaaagtggggtcccatcacgtttcagtggcagtggatctgggacagatttcactctcaccatcagcagtctgcaacctgaagattttgctacgtactactgtggtcagggggtgctgtggcctgcgacgttcggccaagggacaacggtggaaatcaaacgg

SEQ ID NO: 1173 - DNA, 324 bp, Artificial Sequence
  Description of Artificial Sequence: Synthetic polynucleotide
gacatcctgatgacccagtctccatcctccctgtctgcatctgtaggagaccgtgtcaccatcacttgccgggcaagtcattttattggtagtctgttatcttggtaccagcagaaaccagggaaagcccctaagctcctgatcacttatggttccttgttgcaaagtggggtcccatcacgtttcagtggcagtggatctgggacagatttcactctcaccatcagcagtctgcaacctgaagattttgctacgtactactgtggtcagggggtgctgtggcctgcgacgttcggccaagggaccaaggtggaaatcaaacgg

SEQ ID NO: 1174 - DNA, 324 bp, Artificial Sequence
  Description of Artificial Sequence: Synthetic polynucleotide
gacatccagatgacccagtctccatcctccctgtctgcatctgtaggagaccgtgtcaccatcacttgccgggcaagtcattttattggtactctggtatcttggtaccagcagaaaccggggaaagcccctaagctcctgatcacttatggttccttgttgcaaagtggggtcccatcacgtttcagtggcagtggatctgggacagatttcactctcaccatcagcagtctgcaacctgaagattttgctacgtactactgtggtcagggggtgctgtggcctgcgacgtacggccaagggaccaaggtggaaatcaaacgg

SEQ ID NO: 1175 - DNA, 324 bp, Artificial Sequence
  Description of Artificial Sequence: Synthetic polynucleotide
gacatccagatgacccagtctccatcctctctgtctgcatctgtaggagaccgtgtcaccatcacttgccgggcaagtcattttattggtactctggtatcttggtaccagcagaaaccagggaaagcccctaagctcctgatcacttatggttccttgttgcaaagtggggtcccatcacgtttcagtggcagtggatctgggacagatttcactctcaccatcagcagtctgcaacctgaagattttgctacgtactactgtggtcagggggtgctgtggcctgcgactttcggccaagggaccaaggtggaaaacaaacgg

SEQ ID NO: 1176 - DNA, 324 bp, Artificial Sequence
  Description of Artificial Sequence: Synthetic polynucleotide
gacatcaagatgacccagtctccatcctccctgtctgcatctgtaggagaccgtgtcaccatcacttgccgggcgagtcattttattggtactctggtatcttggtaccagcagaaaccagggaaagccccaaagctcctgatcacttatggttccatgttgcaaagtggggtcccatcacgtttcagtggcagtggatctgggacagatttcactctcaccatcagcagtctgcaacctgaagattttgctacgtactactgtggtcagggggtgctgtggcctgcgacgttcggccaagggaccaaggtggaaatcaaacgg

SEQ ID NO: 1177 - DNA, 324 bp, Artificial Sequence
  Description of Artificial Sequence: Synthetic polynucleotide
gacatccagatgacccagtctccatcctccctgtctgcatctgtaggagaccgtgtcaccatcacttgccaggcaagtcattttattggtactctggtatcctggtaccagcagaaaccagggaaagcccctaagctcctgatcacttatggttccttgttgcaaagtggggtcccatcacgtttcagtggcagtggatctgggacagatttcactctcaccatcagcagtctgcaacctgaagattttgctacgtactactgtggtcagggggtgctgtggcccgcgacgttcggccaagggaccaaggtggaaatcaaacgg

SEQ ID NO: 1178 - DNA, 324 bp, Artificial Sequence
  Description of Artificial Sequence: Synthetic polynucleotide
gacatccagatgacccagtctccatcctccctgtctgcatctgtaggagaccgtgtcaccatcacttgccgggcaagtcattttattggtactctgttatcttggtaccagcagaaaccagggaaagcccctaagctcctgatcacttatggttcctggttgcaaagtggggtcccatcacgtttcagtggcagtggatctgggacagatttcactctcaccatcagcagtctgcaacctgaagattttgctacgtactactgtggtcagggggtgctgtggcctgcgacgttcggccaagggaccaaggtggaaatcaaacgg

SEQ ID NO: 1179 - DNA, 324 bp, Artificial Sequence
  Description of Artificial Sequence: Synthetic polynucleotide
gacatccagatgacccagtctccatcctccctgtctgcatctgttggagaccgtgtcaccatcacttgccgggcaagtcattttattggtactctgttatcttggtaccagctgaaaccagggaaagcccctaagctcctgatcacttatggttcctggttgcaaagtggggtcccatcacgtttcagtggcagtggatctgggacagatttcactctcaccatcagcagtctgcaacctgaagattttgctacgtactactgtggtcagggggtgctgtggcctgcgacgttcggccaagggaccaaggtggaaatcaaacgg

SEQ ID NO: 1180 - DNA, 324 bp, Artificial Sequence
  Description of Artificial Sequence: Synthetic polynucleotide
gacatccagatgacccagtctccatcctccctgtctgcatctgtaggagaccgtgtcaccatcacttgccgggcaagtcattttattggtactctgttatcttggtaccagcagaaaccggggaaagcccctaagctcctgatcacttatggttccttgttgcaaagtggggtcccatcacgtttcagtggcagtggatttgggacagatttcactctcaccatcagcagtctgcaacctgaagattttgctacgtactactgtggtcaggaggtgctgtggcctgcgacgttcggccaagggactaaggtggaaatcaaacgg

SEQ ID NO: 1181 - DNA, 324 bp, Artificial Sequence
  Description of Artificial Sequence: Synthetic polynucleotide
gacatccagatgacccagtctccatcctccctgtctgcatctgtaggagaccgtgtctccatcacttgccgagcaagtcattttattggtactctgttatcttggtaccagcagaaaccagggaaagcccctaagctcctgatcacttatggttccttgttgcaaagtggggtcccatcacgtttcagtggcagtggatttgggacagatttcactctcaccatcagcagtctgcaacctgaagatcttgctacgtactactgtggtcaggaggtgctgtggcctgcgacgttcggccaagggaccaaggtggaaatcaaacgg

SEQ ID NO: 1182 - DNA, 324 bp, Artificial Sequence
  Description of Artificial Sequence: Synthetic polynucleotide
gacatccagatgacccagtctccatcctccctgtctgcatctgtaggagaccgtgtcaccatcacttgccaggcaagtcattttattggtactctgttatcttggtaccagcagaaaccagggaaagcccctaagctcctgatcacttatggttccttgttgcaaagtggggtcccatcacgtttcagtggcagtggatttgggacagatttcactctcaccatcagcagtctgcaacccgaagattttgctacgtactactgtggtcaggaggtgctgtggcctgcgacgttcggccaagggaccaaggtggaaatcaaacgg

SEQ ID NO: 1183 - DNA, 324 bp, Artificial Sequence
  Description of Artificial Sequence: Synthetic polynucleotide
gacatccagatgacccagtctccatcctccctgtctgcatcagtaggagaccgtgtcaccatcacttgccgggcaagtcattttattggtactctgttatcttggtaccagcagaaacctgggaaagcccctaagctcctgatcacttatggttccttgttgcaaagtggggtcccatcacgtttcagtggcagtggatttgggacagaattcactctcaccatcggcagtctgcaacctgaagattttgctacgtactactgtggtcagggggtgctgtggcctgcgacgttcggccaagggaccaaggtggaaatcaaacgg

SEQ ID NO: 1184 - DNA, 324 bp, Artificial Sequence
  Description of Artificial Sequence: Synthetic polynucleotide
gacatccagatgacccagtcaccatcctccctgtctgcatctgtaggagaccgtgtcaccatcacttgccgggcaagtcattttattggtactctgttatcttggtaccagcagaaaccagggaaagccactaagctcctgatcacttatggttccttgttgcaaagtggggtcccatcacgtttcagtggcagtggatctgggacagatttcactctcaccatcagcagtctgcaacctgaagattttgctacgtactactgtggtcagggggtgctgtggcctccgacgttcggccaagggaccaaggtggaaatcaaacgg

SEQ ID NO: 1185 - DNA, 324 bp, Artificial Sequence
  Description of Artificial Sequence: Synthetic polynucleotide
gacatccagatgacccagtctccatcctccctgtctgcatctgtaggagaccgtgtcaccatcacttgccgggcaagtcacttcattgccagtctgttatcttggtaccaggtgaaaccagggaaagcccctaagctcctgatcacttatggttccttgttgcaaagtggggtcccatcacgtttcagtggcagtggatctgggacagatttcactctcaccatcagcagtctgcaacctgaagattttgctacgtactactgtggtcagggggtgctgtggcctgcgacgttcggccaagggacaacggtggaaatcaaacgg

SEQ ID NO: 1186 - DNA, 324 bp, Artificial Sequence
  Description of Artificial Sequence: Synthetic polynucleotide
gacatccagatgacccagtctccatcctccctgtctgcatctgtaggagaccgtgtcaccatcacttgccgggcaagtcatttcattgcccagctgttatcttggtaccaggtgaaaccagggaaagcccctaagctcctgatcacttatggttccttgttgcaaagtggggtcccatcacgtttcagtggcagtggatctgggacagatttcactctcaccatcagcagtctgcaacctgaagattttgctacgtactactgtggtcagggggtgctgtggcctgcgacgttcggccaagggacaacggtggaaatcaaacgg

SEQ ID NO: 1187 - DNA, 324 bp, Artificial Sequence
  Description of Artificial Sequence: Synthetic polynucleotide
gacatccagatgacccagtctccatcctccctgtctgcatctgtaggagaccgtgtcaccatcacttgccgggcaagtcatttcattgcccagctgttatcttggtaccaggtgaaaccagggaaagcccctaagctcctgatcacttatggttccttgttgcaaagtggggtcccatcacgtttcagtggcagtggatctgggacagatttcactctcaccatcagcagtctgcaacctgaagattttgctacgtactactgtggtcagggggtgctgtggcctgcgacgttcggccaagggacaacggtggaaatcagacgg

SEQ ID NO: 1188 - DNA, 324 bp, Artificial Sequence
  Description of Artificial Sequence: Synthetic polynucleotide
gacatccagatgacccagtctccatcctccctgtctgcatctgtaggagaccgtgtcaccatcacttgccgggcaagtcattacattgcctccctgttatcttggtaccaggtgaaaccagggaaagcccctaagctcctgatcacttatggttccttgttgcagagtggggccccatcacgtttcagtggcagtggatctgggacagatttcactctcaccatcagcagtctgcaacctgaagattttgctacgtactactgtggtcagggggtgctgtggcctgcgacgttcggccaagggacaacggtggaaatcaaacgg

SEQ ID NO: 1189 - DNA, 324 bp, Artificial Sequence
  Description of Artificial Sequence: Synthetic polynucleotide
gacatccagatgacccagtctccatcctccctgtctgcatctgtaggagaccgtgtcaccatcacttgccgggcaagtcattttattggtagtctgttatcttggtaccaggtgaaaccagggaaagcccctaagctcctgatcacttgggcctcctacttgcaaagtggggtcccatcacgtttcagtggcagtggatctgggacagatttcactctcaccatcagcagtctgcaacctgaagattttgctacgtactactgtggtcagggggtgctgtggcctgcgacgttcggccaagggacaacggtggaaatcaaacgg

SEQ ID NO: 1190 - DNA, 324 bp, Artificial Sequence
  Description of Artificial Sequence: Synthetic polynucleotide
gacatccagatgacccagtctccatcctccctgtctgcatctgtaggagaccgtgtcaccatcacttgccgggcaagtcattttattggtagtctgttatcttggtaccaggtgaaaccagggaaagcccctaagctcctgatcacttggacgtcctacttgcaaagtggggtcccatcacgtttcagtggcagtggatctgggacagatttcactctcaccatcagcagtctgcaacctgaagattttgctacgtactactgtggtcagggggtgctgtggcctgcgacgttcggccaagggacaacggtggaaatcaaacgg

SEQ ID NO: 1191 - DNA, 324 bp, Artificial Sequence
  Description of Artificial Sequence: Synthetic polynucleotide
gacatccagatgacccagtctccatcctccctgtctgcatctgtaggagaccgtgtcaccatcacttgccgggcaagtcattttattggtagtctgttatcttggtaccaggtgaaaccagggaaagcccctaagctcctgatcacttggtcgtcctacttgcaaagtggggtcccatcacgtttcagtggcagtggatctgggacagatttcactctcaccatcagcagtctgcaacctgaagattttgctacgtactactgtggtcagggggtgctgtggcctgcgacgttcggccaagggacaacggtggaaatcaaacgg

SEQ ID NO: 1192 - DNA, 324 bp, Artificial Sequence
  Description of Artificial Sequence: Synthetic polynucleotide
gacatccagatgacccagtctccatcctccctgtctgcatctgtaggagaccgtgtcaccatcacttgccgggcaagtcattttattggtagtctgttatcttggtaccaggtgaaaccagggaaagcccctaagctcctgatcacttgggggtcctggttgcaaagtggggtcccatcacgtttcagtggcagtggatctgggacagatttcactctcaccatcagcagtctgcaacctgaagattttgctacgtactactgtggtcagggggtgctgtggcctgcgacgttcggccaagggacaacggtggaaatcaaacgg

SEQ ID NO: 1193 - DNA, 324 bp, Artificial Sequence
  Description of Artificial Sequence: Synthetic polynucleotide
gacatccagatgacccagtctccatcctccctgtctgcatctgtaggagaccgtgtcaccatcacttgccgggcaagtcattttattggtagtctgttatcttggtaccaggtgaaaccagggaaagcccctaagctcctgatcacttgggcgtcctggttgcaaagtggggtcccatcacgtttcagtggcagtggatctgggacagatttcactctcaccatcagcagtctgcaacctgaagattttgctacgtactactgtggtcagggggtgctgtggcctgcgacgttcggccaagggacaacggtggaaatcaaacgg

SEQ ID NO: 1194 - DNA, 324 bp, Artificial Sequence
  Description of Artificial Sequence: Synthetic polynucleotide
gacatccagatgacccagtctccatcctccctgtctgcatctgtaggagaccgtgtcaccatcacttgccgggcaagtcattttattggtagtctgttatcttggtaccaggtgaaaccagggaaagcccctaagctcctgatcacttggagctcctggttgcaaagtggggtcccatcacgtttcagtggcagtggatctgggacagatttcactctcaccatcagcagtctgcaacctgaagattttgctacgtactactgtggtcagggggtgctgtggcctgcgacgttcggccaagggacaacggtggaaatcaaacgg

SEQ ID NO: 1195 - DNA, 324 bp, Artificial Sequence
  Description of Artificial Sequence: Synthetic polynucleotide
gacatccagatgacccagtctccatcctccctgtctgcatctgtaggagaccgtgtcaccatcacttgccgggcaagtcattggattgcccagctgttatcttggtaccaggtgaaaccagggaaagcccctaagctcctgatcacttatggttccttgttgcaaagtggggtcccatcacgtttcagtggcagtggatctgggacagatttcactctcaccatcagcagtctgcaacctgaagattttgctacgtactactgtggtcagggggtgctgtggcctgcgacgttcggccaagggacaacggtggaaatcaaacgg

SEQ ID NO: 1196 - DNA, 324 bp, Artificial Sequence
  Description of Artificial Sequence: Synthetic polynucleotide
gacatccagatgacccagtctccatcctccctgtctgcatctgtaggagaccgtgtcaccatcacttgccgggcaagtcattttattggttcgctcttacgctggtaccaggtgaaaccagggaaagcccctaagctcctgatcacttatggttccttgttgcaaagtggggtcccatcacgtttcagtggcagtggatctgggacagatttcactctcaccatcagcagtctgcaacctgaagattttgctacgtactactgtggtcagggggtgctgtggcctgcgacgttcggccaagggacaacggtggaaatcaaacgg

SEQ ID NO: 1197 - DNA, 324 bp, Artificial Sequence
  Description of Artificial Sequence: Synthetic polynucleotide
gacatccagatgacccagtctccatcctccctgtctgcatctgtaggagaccgtgtcaccatcacttgccgggcaagtcatcggattgcccagctgttatcttggtaccaggtgaaaccagggaaagcccctaagctcctgatcacttatggttccttgttgcaaagtggggtcccatcacgtttcagtggcagtggatctgggacagatttcactctcaccatcagcagtctgcaacctgaagattttgctacgtactactgtggtcagggggtgctgtggcctgcgacgttcggccaagggacaacggtggaaatcaaacgg

SEQ ID NO: 1198 - DNA, 324 bp, Artificial Sequence
  Description of Artificial Sequence: Synthetic polynucleotide
gacatccagatgacccagtctccatcctccctgtctgcatctgtaggagaccgtgtcaccatcacttgccgggcaagtcattacattgcctccctgttatcttggtaccaggtgaaaccagggaaagcccctaagctcctgatcacttatggttccttgttgcaaagtggggtcccatcacgtttcagtggcagtggatctgggacagatttcactctcaccatcagcagtctgcaacctgaagattttgctacgtactactgtggtcagggggtgctgtggcctgcgacgttcggccaagggacaacggtggaaatcaaacgg

SEQ ID NO: 1199 - DNA, 324 bp, Artificial Sequence
  Description of Artificial Sequence: Synthetic polynucleotide
gacatccagatgacccagtctccatcctccctgtctgcatctgtaggagaccgtgtcaccatcacttgccgggcaagtcattttattggtagtctgttatcttggtaccaggtgaaaccagggaaagcccctaagctcctgatccggttcggctccttgttgcaaagtggggtcccatcacgtttcagtggcagtggatctgggacagatttcactctcaccatcagcagtctgcaacctgaagattttgctacgtactactgtggtcagggggtgctgtggcctgcgacgttcggccaagggacaacggtggaaatcaaacgg

SEQ ID NO: 1200 - DNA, 324 bp, Artificial Sequence
  Description of Artificial Sequence: Synthetic polynucleotide
gacatccagatgacccagtctccatcctccctgtctgcatctgtaggagaccgtgtcaccatcacttgccgggcaagtcattttattggtagtctgttatcttggtaccaggtgaaaccagggaaagcccctaagctcctgatcacttacaagtcctacttgcaaagtggggtcccatcacgtttcagtggcagtggatctgggacagatttcactctcaccatcagcagtctgcaacctgaagattttgctacgtactactgtggtcagggggtgctgtggcctgcgacgttcggccaagggacaacggtggaaatcaaacgg

SEQ ID NO: 1201 - DNA, 324 bp, Artificial Sequence
  Description of Artificial Sequence: Synthetic polynucleotide
gacatccagatgacccagtctccatcctccctgtctgcatctgtaggagaccgtgtcaccatcacttgccgggcaagtcattttattggtagtctgttatcttggtaccaggtgaaaccagggaaagcccctaagctcctgatcacttggggctcctacttgcaaagtggggtcccatcacgtttcagtggcagtggatctgggacagatttcactctcaccatcagcagtctgcaacctgaagattttgctacgtactactgtggtcagggggtgctgtggcctgcgacgttcggccaagggacaacggtggaaatcaaacgg

SEQ ID NO: 1202 - DNA, 324 bp, Artificial Sequence
  Description of Artificial Sequence: Synthetic polynucleotide
gacatccagatgacccagtctccatcctccctgtctgcatctgtaggagaccgtgtcaccatcacttgccgggcaagtcattttatttgggggcccttatcttggtaccaggtgaaaccagggaaagcccctaagctcctgatcacttatggttccttgttgcaaagtggggtcccatcacgtttcagtggcagtggatctgggacagatttcactctcaccatcagcagtctgcaacctgaagattctgctacgtactactgtggtcagggggtgctgtggcctgcgacgttcggccaagggacaacggtggaaatcaaacgg

SEQ ID NO: 1203 - DNA, 324 bp, Artificial Sequence
  Description of Artificial Sequence: Synthetic polynucleotide
gacatccagatgacccagtctccatcctccctgtctgcatctgtaggagaccgtgtcaccatcacttgccgggcaagtcattggattgccaccctgttatcttggtaccaggtgaaaccagggaaagcccctaagctcctgatcacttatggttccttgttgcaaagtggggtcccatcacgtttcagtggcagtggatctgggacagatttcactctcaccatcagcagtctgcaacctgaagattttgctacgtactactgtggtcagggggtgctgtggcctgcgacgttcggccaagggacaacggtggaaatcaaacgg

SEQ ID NO: 1204 - DNA, 324 bp, Artificial Sequence
  Description of Artificial Sequence: Synthetic polynucleotide
gacatccagatgacccagtctccatcctccctgtctgcatctgtaggagaccgtgtcaccatcacttgccgggcaagtcattttatttgggggcccttatcttggtaccaggtgaaaccagggaaagcccctaagctcctgatcacttatggttccttgttgcaaagtggggtcccatcacgtttcagtggcagtggatctgggacagatttcactctcaccatcagcagtctgcaacctgaagattttgctacgtactactgtggtcagggggtgctgtggcctgcgacgttcggccaagggacaacggtggaaatcaaacgg

SEQ ID NO: 1205 - DNA, 324 bp, Artificial Sequence
  Description of Artificial Sequence: Synthetic polynucleotide
gacatccagatgacccagtctccatcctccctgtctgcatctgtaggagaccgtgtcaccatcacttgccgggcaagtcattttattggtagcctcttaaactggtaccaggtgaaaccagggaaagcccctaagctcctgatcacttatggttccttgttgcaaagtggggtcccatcacgtttcagtggcagtggatctgggacagatttcactctcaccatcagcagtctgcaacctgaagattttgctacgtactactgtggtcagggggtgctgtggcctgcgacgttcggccaagggacaacggtggaaatcaaacgg

SEQ ID NO: 1206 - DNA, 324 bp, Artificial Sequence
  Description of Artificial Sequence: Synthetic polynucleotide
ggcatccagatgacccagtctccatcctccctgtctgcatctgtaggagaccgtgtcaccatcacttgccgggcaagtcattttattggtagtctgttatcttggtaccaggtgaaaccagggaaagcccctaagctcctgatcacttacgggtcctggttgcaaagtggggtcccatcacgtttcagtggcagtggatctgggacagatttcactctcaccatcagcagtctgcaacctgaagattttgctacgtactactgtggtcagggggtgctgtggcctgcgacgttcggccaagggacaacggtggaaatcaaacgg

SEQ ID NO: 1207 - protein, 5 aa, Artificial Sequence
  Description of Artificial Sequence: Synthetic peptide
GGGGS

SEQ ID NO: 1208 - protein, 15 aa, Artificial Sequence
  Description of Artificial Sequence: Synthetic peptide
GGGGSGGGGSGGGGS

SEQ ID NO: 1209 - protein, 25 aa, Artificial Sequence
  Description of Artificial Sequence: Synthetic peptide
GGGGSGGGGSGGGGSGGGGSGGGGS

SEQ ID NO: 1210 - protein, 227 aa, Artificial Sequence
  Description of Artificial Sequence: Synthetic polypeptide
EVQLLESGGGLVQPGGSLRLSCAASGFTFRDYEMWWVRQAPGKGLERVSAINPQGTRTYYADSVKGRFTISRDNSKNTLYLQMNSLRAEDTAVYYCAKLPFYFQEWGQGTLVTVSSASTDIQMTQSPSSLSASVGDRVTITCRASRPIGTTLSWYQQKPGKAPKLLILWNSRLQSGVPSRFSGSGSGTDFTLTISSLQPEDFATYYCAQAGTHPTTFGQGTKVEIKR

SEQ ID NO: 1211 - protein, 227 aa, Artificial Sequence
  Description of Artificial Sequence: Synthetic polypeptide
EVQLLESGGGLVQPGGSLRLSCAASGFTFRDYEMWWVRQAPGKGLERVSAINPQGTRTYYADSVKGRFTISRDNSKNTLYLQMNSLRAEDTAVYYCAKLPFYFQEWGQGTLVTVSSASTDIQMTQSPSSLSASVGDRVTITCRASRPIGTMLSWYQQKPGKAPKLLILAFSRLQSGVPSRFSGSGSGTDFTLTISSLQPEDFATYYCAQAGTHHTTFGQGTKVEIKR

SEQ ID NO: 1212 - protein, 227 aa, Artificial Sequence
  Description of Artificial Sequence: Synthetic polypeptide
EVQLLESGGGLVQPGGSLRLSCAASGFTFRDYEMWWVRQAPGKGLERVSAINPQGTRTYYADSVKGRFTISRDNSKNTLYLQMNSLRAEDTAVYYCAKLPFYFHEWGQGTLVTVSSASTDIQMTQSPSSLSASVGDRVTITCRASRPIGTTLSWYQQKPGKAPKLLILWNSRLQSGVPSRFSGSGSGTDFTLTISSLQPEDFATYYCAQAGTHPTTFGQGTKVEIKR

SEQ ID NO: 1213 - protein, 227 aa, Artificial Sequence
  Description of Artificial Sequence: Synthetic polypeptide
EVQLLESGGGLVQPGGSLRLSCAASGFTFRDYEMWWVRQAPGKGLERVSAINPQGTRTYYADSVKGRFTISRDNSKNTLYLQMNSLRAEDTAVYYCAKLPFYFHEWGQGTLVTVSSASTDIQMTQSPSSLSASVGDRVTITCRASRPIGTMLSWYQQKPGKAPKLLILAFSRLQSGVPSRFSGSGSGTDFTLTISSLQPEDFATYYCAQAGTHHTTFGQGTKVEIKR

SEQ ID NO: 1214 - protein, 230 aa, Artificial Sequence
  Description of Artificial Sequence: Synthetic polypeptide
DIQMTQSPSSLSASVGDRVTITCRASRPIGTTLSWYQQKPGKAPKLLILWNSRLQSGVPSRFSGSGSGTDFTLTISSLQPEDFATYYCAQAGTHPTTFGQGTKVEIKRTVAAPSEVQLLESGGGLVQPGGSLRLSCAASGFTFRDYEMWWVRQAPGKGLERVSAINPQGTRTYYADSVKGRFTISRDNSKNTLYLQMNSLRAEDTAVYYCAKLPFYFQEWGQGTLVTVSS

SEQ ID NO: 1215 - protein, 230 aa, Artificial Sequence
  Description of Artificial Sequence: Synthetic polypeptide
DIQMTQSPSSLSASVGDRVTITCRASRPIGTMLSWYQQKPGKAPKLLILAFSRLQSGVPSRFSGSGSGTDFTLTISSLQPEDFATYYCAQAGTHHTTFGQGTKVEIKRTVAAPSEVQLLESGGGLVQPGGSLRLSCAASGFTFRDYEMWWVRQAPGKGLERVSAINPQGTRTYYADSVKGRFTISRDNSKNTLYLQMNSLRAEDTAVYYCAKLPFYFQEWGQGTLVTVSS

SEQ ID NO: 1216 - protein, 230 aa, Artificial Sequence
  Description of Artificial Sequence: Synthetic polypeptide
DIQMTQSPSSLSASVGDRVTITCRASRPIGTTLSWYQQKPGKAPKLLILWNSRLQSGVPSRFSGSGSGTDFTLTISSLQPEDFATYYCAQAGTHPTTFGQGTKVEIKRTVAAPSEVQLLESGGGLVQPGGSLRLSCAASGFTFRDYEMWWVRQAPGKGLERVSAINPQGTRTYYADSVKGRFTISRDNSKNTLYLQMNSLRAEDTAVYYCAKLPFYFHEWGQGTLVTVSS

SEQ ID NO: 1217 - protein, 230 aa, Artificial Sequence
  Description of Artificial Sequence: Synthetic polypeptide
DIQMTQSPSSLSASVGDRVTITCRASRPIGTMLSWYQQKPGKAPKLLILAFSRLQSGVPSRFSGSGSGTDFTLTISSLQPEDFATYYCAQAGTHHTTFGQGTKVEIKRTVAAPSEVQLLESGGGLVQPGGSLRLSCAASGFTFRDYEMWWVRQAPGKGLERVSAINPQGTRTYYADSVKGRFTISRDNSKNTLYLQMNSLRAEDTAVYYCAKLPFYFHEWGQGTLVTVSS

SEQ ID NO: 1218 - protein, 230 aa, Artificial Sequence
  Description of Artificial Sequence: Synthetic polypeptide
DIQMTQSPSSLSASVGDRVTITCRASRPIGTMLSWYQQKPGKAPKLLILAFSRLQSGVPSRFSGSGSGTDFTLTISNLQPEDFATYYCAQAGTHPTTFGQGTKVEIKRTVAAPSEVQLLESGGGLVQPGGSLRLSCAASGFTFRDYEMWWVRQAPGKGLERVSAINPQGTRTYYADSVKGRFTISRDNSKNTLYLQMNSLRAEDTAVYYCAKLPFYFQEWGQGTLVTVSS

SEQ ID NO: 1219 - protein, 230 aa, Artificial Sequence
  Description of Artificial Sequence: Synthetic polypeptide
DIQMTQSPSSLSASVGDRVTITCRASRPIGTMLSWYQQKPGKAPKLLILAFSRLQSGVPSRFSGSGSGTDFTLTISSLQPEDVATYYCAQAGTHPTTFGQGTKVEIKRTVAAPSEVQLLESGGGLVQPGGSLRLSCAASGFTFRDYEMWWVRQAPGKGLERVSAINPQGTRTYYADSVKGRFTISRDNSKNTLYLQMNSLRAEDTAVYYCAKLPFYFQEWGQGTLVTVSS

SEQ ID NO: 1220 - protein, 230 aa, Artificial Sequence
  Description of Artificial Sequence: Synthetic polypeptide
DIQMTQSPSSLSASVGDRVTITCRASRPIGTMLSWYQQKPGKAPKLLILAFSRLQSGVPSRFSGSGSGTDFTLTISSLQPEDFATYYCAQAGVHPTTFGQGTKVEIKRTVAAPSEVQLLESGGGLVQPGGSLRLSCAASGFTFRDYEMWWVRQAPGKGLERVSAINPQGTRTYYADSVKGRFTISRDNSKNTLYLQMNSLRAEDTAVYYCAKLPFYFQEWGQGTLVTVSS

SEQ ID NO: 1221 - protein, 230 aa, Artificial Sequence
  Description of Artificial Sequence: Synthetic polypeptide
DIQMTQSPSSLSASVGDRVTITCRASRPIGTTLSWYQQKPGKAPKLLILWNSRLQSGVPSRFSGSGSGTDFTLTISSLQPEDFATYYCAQAGTHPTTFGQGTKVEIKRTVAAPSEVQLLESGGGLVQPGGSLRLSCAASGFTFEEEEMIWVRQAPGKGLEWVSAISRNGYSTYYADSVKGRFTISRDNSKNTLYLQMNSLRAEDTAVYYCGKEPFRYDYWGQGTLVTVSS

SEQ ID NO: 1222 - protein, 227 aa, Artificial Sequence
  Description of Artificial Sequence: Synthetic polypeptide
EVQLLESGGGLVQPGGSLRLSCAASGFTFEEEEMIWVRQAPGKGLEWVSAISRNGYSTYYADSVKGRFTISRDNSKNTLYLQMNSLRAEDTAVYYCGKEPFRYDYWGQGTLVTVSSASTDIQMTQSPSSLSASVGDRVTITCRASRPIGTTLSWYQQKPGKAPKLLILWNSRLQSGVPSRFSGSGSGTDFTLTISSLQPEDFATYYCAQAGTHPTTFGQGTKVEIKR

SEQ ID NO: 1223 - protein, 230 aa, Artificial Sequence
  Description of Artificial Sequence: Synthetic polypeptide
DIQMTQSPSSLSASVGDRVTITCRASQWIGSQLSWYQQKPGKAPKLLIMWRSSLQSGVPSRFSGSGSGTDFTLTISSLQPEDFATYYCAQGLRHPKTFGQGTKVEIKRTVAAPSEVQLLESGGGLVQPGGSLRLSCAASGFTFEEEEMIWVRQAPGKGLEWVSAISRNGYSTYYADSVKGRFTISRDNSKNTLYLQMNSLRAEDTAVYYCGKEPFRYDYWGQGTLVTVSS

SEQ ID NO: 1224 - protein, 227 aa, Artificial Sequence
  Description of Artificial Sequence: Synthetic polypeptide
EVQLLESGGGLVQPGGSLRLSCAASGFTFEEEEMIWVRQAPGKGLEWVSAISRNGYSTYYADSVKGRFTISRDNSKNTLYLQMNSLRAEDTAVYYCGKEPFRYDYWGQGTLVTVSSASTDIQMTQSPSSLSASVGDRVTITCRASQWIGSQLSWYQQKPGKAPKLLIMWRSSLQSGVPSRFSGSGSGTDFTLTISSLQPEDFATYYCAQGLRHPKTFGQGTKVEIKR

SEQ ID NO: 1225 - protein, 227 aa, Artificial Sequence
  Description of Artificial Sequence: Synthetic polypeptide
EVQLLASGGGLVQPGGSLRLSCAASGFTFEEEEMIWVRQAPGKGLEWVSAISRNGYSTYYADSVKGRFTISRDNSKNTLYLQMNSLRAEDTAVYYCGKEPFRYDYWGQGTLVTVSSASTDIQMTQSPSSLSASVGDRVTITCRASRPIGTTLSWYQQKPGKAPKLLILWNSRLQSGVPSRFSGSGSGTDFTLTISSLQPEDFATYYCAQAGTHPTTFGQGTKVEIKR

SEQ ID NO: 1226 - protein, 227 aa, Artificial Sequence
  Description of Artificial Sequence: Synthetic polypeptide
EVQLLASGGGLVQPGGSLRLSCAASGFTFEEEEMIWVRQAPGKGLEWVSAISRNGYSTYYADSVKGRFTISRDNSKNTLYLQMNSLRAEDTAVYYCGKEPFRYDYWGQGTLVTVSSASTDIQMTQSPSSLSASVGDRVTITCRASRPIGTMLSWYQQKPGKAPKLLILAFSRLQSGVPSRFSGSGSGTDFTLTISNLQPEDFATYYCAQAGTHPTTFGQGTKVEIKR

SEQ ID NO: 1227 - protein, 230 aa, Artificial Sequence
  Description of Artificial Sequence: Synthetic polypeptide
DIQMTQSPSSLSASVGDRVTITCRASRPIGTTLSWYQQKPGKAPKLLILWNSRLQSGVPSRFSGSGSGTDFTLTISSLQPEDFATYYCAQAGTHPTTFGQGTKVEIKRTVAAPSEVQLLASGGGLVQPGGSLRLSCAASGFTFEEEEMIWVRQAPGKGLEWVSAISRNGYSTYYADSVKGRFTISRDNSKNTLYLQMNSLRAEDTAVYYCGKEPFRYDYWGQGTLVTVSS

SEQ ID NO: 1228 - protein, 230 aa, Artificial Sequence
  Description of Artificial Sequence: Synthetic polypeptide
DIQMTQSPSSLSASVGDRVTITCRASRPIGTMLSWYQQKPGKAPKLLILAFSRLQSGVPSRFSGSGSGTDFTLTISNLQPEDFATYYCAQAGTHPTTFGQGTKVEIKRTVAAPSEVQLLASGGGLVQPGGSLRLSCAASGFTFEEEEMIWVRQAPGKGLEWVSAISRNGYSTYYADSVKGRFTISRDNSKNTLYLQMNSLRAEDTAVYYCGKEPFRYDYWGQGTLVTVSS

SEQ ID NO: 1229 - protein, 227 aa, Artificial Sequence
  Description of Artificial Sequence: Synthetic polypeptide
DIQMTQSPSSLSASVGDRVTITCRASRPIGTMLSWYQQKPGKAPKLLILAFSRLQSGVPSRFSGSGSGTDFTLTISNLQPEDFATYYCAQAGTHPTTFGQGTKVEIKRTVAEVQLLESGGGLVQPGGSLRLSCAASGFTFRDYEMWWVRQAPGKGLERVSAINPQGTRTYYADSVKGRFTISRDNSKNTLYLQMNSLRAEDTAVYYCAKLPFYFHEWGQGTLVTVSS

SEQ ID NO: 1230 - protein, 231 aa, Artificial Sequence
  Description of Artificial Sequence: Synthetic polypeptide
DIQMTQSPSSLSASVGDRVTITCRASRPIGTMLSWYQQKPGKAPKLLILAFSRLQSGVPSRFSGSGSGTDFTLTISNLQPEDFATYYCAQAGTHPTTFGQGTKVEIKRASTSGPSEVQLLESGGGLVQPGGSLRLSCAASGFTFRDYEMWWVRQAPGKGLERVSAINPQGTRTYYADSVKGRFTISRDNSKNTLYLQMNSLRAEDTAVYYCAKLPFYFHEWGQGTLVTVSS

SEQ ID NO: 1231 - protein, 229 aa, Artificial Sequence
  Description of Artificial Sequence: Synthetic polypeptide
DIQMTQSPSSLSASVGDRVTITCRASRPIGTMLSWYQQKPGKAPKLLILAFSRLQSGVPSRFSGSGSGTDFTLTISNLQPEDFATYYCAQAGTHPTTFGQGTKVEIKRGGGGSEVQLLESGGGLVQPGGSLRLSCAASGFTFRDYEMWWVRQAPGKGLERVSAINPQGTRTYYADSVKGRFTISRDNSKNTLYLQMNSLRAEDTAVYYCAKLPFYFHEWGQGTLVTVSS

SEQ ID NO: 1232 - protein, 239 aa, Artificial Sequence
  Description of Artificial Sequence: Synthetic polypeptide
DIQMTQSPSSLSASVGDRVTITCRASRPIGTMLSWYQQKPGKAPKLLILAFSRLQSGVPSRFSGSGSGTDFTLTISNLQPEDFATYYCAQAGTHPTTFGQGTKVEIKRGGGGSGGGGSGGGGSEVQLLESGGGLVQPGGSLRLSCAASGFTFRDYEMWWVRQAPGKGLERVSAINPQGTRTYYADSVKGRFTISRDNSKNTLYLQMNSLRAEDTAVYYCAKLPFYFHEWGQGTLVTVSS

SEQ ID NO: 1233 - protein, 249 aa, Artificial Sequence
  Description of Artificial Sequence: Synthetic polypeptide
DIQMTQSPSSLSASVGDRVTITCRASRPIGTMLSWYQQKPGKAPKLLILAFSRLQSGVPSRFSGSGSGTDFTLTISNLQPEDFATYYCAQAGTHPTTFGQGTKVEIKRGGGGSGGGGSGGGGSGGGGSGGGGSEVQLLESGGGLVQPGGSLRLSCAASGFTFRDYEMWWVRQAPGKGLERVSAINPQGTRTYYADSVKGRFTISRDNSKNTLYLQMNSLRAEDTAVYYCAKLPFYFHEWGQGTLVTVSS

SEQ ID NO: 1234 - protein, 227 aa, Artificial Sequence
  Description of Artificial Sequence: Synthetic polypeptide
EVQLLESGGGLVQPGGSLRLSCAASGFTFRDYEMWWVRQAPGKGLERVSAINPQGTRTYYADSVKGRFTISRDNSKNTLYLQMNSLRAEDTAVYYCAKLPFYFHEWGQGTLVTVSSTVADIQMTQSPSSLSASVGDRVTITCRASRPIGTMLSWYQQKPGKAPKLLILAFSRLQSGVPSRFSGSGSGTDFTLTISNLQPEDFATYYCAQAGTHPTTFGQGTKVEIKR

SEQ ID NO: 1235 - protein, 231 aa, Artificial Sequence
  Description of Artificial Sequence: Synthetic polypeptide
EVQLLESGGGLVQPGGSLRLSCAASGFTFRDYEMWWVRQAPGKGLERVSAINPQGTRTYYADSVKGRFTISRDNSKNTLYLQMNSLRAEDTAVYYCAKLPFYFHEWGQGTLVTVSSASTSGPSDIQMTQSPSSLSASVGDRVTITCRASRPIGTMLSWYQQKPGKAPKLLILAFSRLQSGVPSRFSGSGSGTDFTLTISNLQPEDFATYYCAQAGTHPTTFGQGTKVEIKR

SEQ ID NO: 1236 - protein, 229 aa, Artificial Sequence
  Description of Artificial Sequence: Synthetic polypeptide
EVQLLESGGGLVQPGGSLRLSCAASGFTFRDYEMWWVRQAPGKGLERVSAINPQGTRTYYADSVKGRFTISRDNSKNTLYLQMNSLRAEDTAVYYCAKLPFYFHEWGQGTLVTVSSGGGGSDIQMTQSPSSLSASVGDRVTITCRASRPIGTMLSWYQQKPGKAPKLLILAFSRLQSGVPSRFSGSGSGTDFTLTISNLQPEDFATYYCAQAGTHPTTFGQGTKVEIKR

SEQ ID NO: 1237 - protein, 239 aa, Artificial Sequence
  Description of Artificial Sequence: Synthetic polypeptide
EVQLLESGGGLVQPGGSLRLSCAASGFTFRDYEMWWVRQAPGKGLERVSAINPQGTRTYYADSVKGRFTISRDNSKNTLYLQMNSLRAEDTAVYYCAKLPFYFHEWGQGTLVTVSSGGGGSGGGGSGGGGSDIQMTQSPSSLSASVGDRVTITCRASRPIGTMLSWYQQKPGKAPKLLILAFSRLQSGVPSRFSGSGSGTDFTLTISNLQPEDFATYYCAQAGTHPTTFGQGTKVEIKR

SEQ ID NO: 1238 - protein, 249 aa, Artificial Sequence
  Description of Artificial Sequence: Synthetic polypeptide
EVQLLESGGGLVQPGGSLRLSCAASGFTFRDYEMWWVRQAPGKGLERVSAINPQGTRTYYADSVKGRFTISRDNSKNTLYLQMNSLRAEDTAVYYCAKLPFYFHEWGQGTLVTVSSGGGGSGGGGSGGGGSGGGGSGGGGSDIQMTQSPSSLSASVGDRVTITCRASRPIGTMLSWYQQKPGKAPKLLILAFSRLQSGVPSRFSGSGSGTDFTLTISNLQPEDFATYYCAQAGTHPTTFGQGTKVEIKR

SEQ ID NO: 1239 - protein, 230 aa, Artificial Sequence
  Description of Artificial Sequence: Synthetic polypeptide
DIQMTQSPSSLSASVGDRVTITCRASRPIGTMLSWYQQKPGKAPKLLILAFSRLQSGVPSRFSGSGSGTDFTLTISNLQPEDFATYYCAQAGTHPTTFGQGTKVEIKRTVAAPSEVQLLESGGGLVQPGGSLRLSCAASGFTFRDYEMWWVRQAPGKGLERVSAINPQGTRTYYADSVKGRFTISRDNSKNTLYLQMNSLRAEDTAVYYCAKLPFYFHEWGQGTLVTVSS

SEQ ID NO: 1240 - DNA, 681 bp, Artificial Sequence
  Description of Artificial Sequence: Synthetic polynucleotide
gaggtgcagctgttggagtctgggggaggcttggtacagcctggggggtccctgcgtctctcctgtgcagcctccggattcacctttcgggattatgagatgtggtgggtccgccaggctccagggaagggtctagagcgggtctcagctattaatccgcagggtacgcgtacatactacgcagactccgtgaagggccggttcaccatctcccgcgacaattccaagaacacgctgtatctgcaaatgaacagcctgcgtgccgaggacaccgcggtatattactgtgcgaaacttccgttttactttcaggagtggggtcagggaaccctggtcaccgtctcgagcgctagcaccgacatccagatgacccagtctccatcctccctgtctgcatctgtaggagaccgtgtcaccatcacttgccgggcaagtcgtccgattgggacgacgttaagttggtaccagcagaaaccagggaaagcccctaagctcctgatcctttggaattcccgtttgcaaagtggggtcccatcacgtttcagtggcagtggatctgggacagatttcactctcaccatcagcagtctgcaacctgaagattttgctacgtactactgtgcgcaggctgggacgcatcctacgacgttcggccaagggaccaaggtggaaatcaaacgg

SEQ ID NO: 1241 - DNA, 681 bp, Artificial Sequence
  Description of Artificial Sequence: Synthetic polynucleotide
gaggtgcagctgttggagtctgggggaggcttggtacagcctggggggtccctgcgtctctcctgtgcagcctccggattcacctttcgggattatgagatgtggtgggtccgccaggctccagggaagggtctagagcgggtctcagctattaatccgcagggtacgcgtacatactacgcagactccgtgaagggccggttcaccatctcccgcgacaattccaagaacacgctgtatctgcaaatgaacagcctgcgtgccgaggacaccgcggtatattactgtgcgaaacttccgttttactttcaggagtggggtcagggaaccctggtcaccgtctcgagcgctagcaccgacatccagatgacccagtctccatcctccctgtctgcatctgtaggagaccgtgtcaccatcacttgccgggcaagtcgtccgattgggacgatgttaagttggtaccagcagaaaccagggaaagcccctaagctcctgatccttgctttttcccgtttgcaaagtggggtcccatcacgtttcagtggcagtggatctgggacagatttcactctcaccatcagcagtctgcaacctgaagattttgctacgtactactgtgcgcaggctgggacgcatcatacgacgttcggccaagggaccaaggtggaaatcaaacgg

SEQ ID NO: 1242 - DNA, 681 bp, Artificial Sequence
  Description of Artificial Sequence: Synthetic polynucleotide
gaggtgcagctgttggagtctgggggaggcttggtacagcctggggggtccctgcgtctctcctgtgcagcctccggattcacctttcgggattatgagatgtggtgggtccgccaggctccagggaagggtctagagcgggtctcagctattaatccgcagggtacgcgtacatactacgcagactccgtgaagggccggttcaccatctcccgcgacaattccaagaacacgctgtatctgcaaatgaacagcctgcgtgccgaggacaccgcggtatattactgtgcgaaacttccgttttactttcacgagtggggtcagggaaccctggtcaccgtctcgagcgctagcaccgacatccagatgacccagtctccatcctccctgtctgcatctgtaggagaccgtgtcaccatcacttgccgggcaagtcgtccgattgggacgacgttaagttggtaccagcagaaaccagggaaagcccctaagctcctgatcctttggaattcccgtttgcaaagtggggtcccatcacgtttcagtggcagtggatctgggacagatttcactctcaccatcagcagtctgcaacctgaagattttgctacgtactactgtgcgcaggctgggacgcatcctacgacgttcggccaagggaccaaggtggaaatcaaacgg

SEQ ID NO: 1243 - DNA, 681 bp, Artificial Sequence
  Description of Artificial Sequence: Synthetic polynucleotide
gaggtgcagctgttggagtctgggggaggcttggtacagcctggggggtccctgcgtctctcctgtgcagcctccggattcacctttcgggattatgagatgtggtgggtccgccaggctccagggaagggtctagagcgggtctcagctattaatccgcagggtacgcgtacatactacgcagactccgtgaagggccggttcaccatctcccgcgacaattccaagaacacgctgtatctgcaaatgaacagcctgcgtgccgaggacaccgcggtatattactgtgcgaaacttccgttttactttcacgagtggggtcagggaaccctggtcaccgtctcgagcgctagcaccgacatccagatgacccagtctccatcctccctgtctgcatctgtaggagaccgtgtcaccatcacttgccgggcaagtcgtccgattgggacgatgttaagttggtaccagcagaaaccagggaaagcccctaagctcctgatccttgctttttcccgtttgcaaagtggggtcccatcacgtttcagtggcagtggatctgggacagatttcactctcaccatcagcagtctgcaacctgaagattttgctacgtactactgtgcgcaggctgggacgcatcatacgacgttcggccaagggaccaaggtggaaatcaaacgg

SEQ ID NO: 1244 - DNA, 690 bp, Artificial Sequence
  Description of Artificial Sequence: Synthetic polynucleotide
gacatccagatgacccagtctccatcctccctgtctgcatctgtaggagaccgtgtcaccatcacttgccgggcaagtcgtccgattgggacgacgttaagttggtaccagcagaaaccagggaaagcccctaagctcctgatcctttggaattcccgtttgcaaagtggggtcccatcacgtttcagtggcagtggatctgggacagatttcactctcaccatcagcagtctgcaacctgaagattttgctacgtactactgtgcgcaggctgggacgcatcctacgacgttcggccaagggaccaaggtggaaatcaaacgtacggtggctgcaccatctgaggtgcagctgttggagtctgggggaggcttggtacagcctggggggtccctgcgtctctcctgtgcagcctccggattcacctttcgggattatgagatgtggtgggtccgccaggctccagggaagggtctagagcgggtctcagctattaatccgcagggtacgcgtacatactacgcagactccgtgaagggccggttcaccatctcccgcgacaattccaagaacacgctgtatctgcaaatgaacagcctgcgtgccgaggacaccgcggtatattactgtgcgaaacttccgttttactttcaggagtggggtcagggaaccctggtcaccgtctccagc

SEQ ID NO: 1245 - DNA, 690 bp, Artificial Sequence
  Description of Artificial Sequence: Synthetic polynucleotide
gacatccagatgacccagtctccatcctccctgtctgcatctgtaggagaccgtgtcaccatcacttgccgggcaagtcgtccgattgggacgatgttaagttggtaccagcagaaaccagggaaagcccctaagctcctgatccttgctttttcccgtttgcaaagtggggtcccatcacgtttcagtggcagtggatctgggacagatttcactctcaccatcagcagtctgcaacctgaagattttgctacgtactactgtgcgcaggctgggacgcatcatacgacgttcggccaagggaccaaggtggaaatcaaacgtacggtggctgcaccatctgaggtgcagctgttggagtctgggggaggcttggtacagcctggggggtccctgcgtctctcctgtgcagcctccggattcacctttcgggattatgagatgtggtgggtccgccaggctccagggaagggtctagagcgggtctcagctattaatccgcagggtacgcgtacatactacgcagactccgtgaagggccggttcaccatctcccgcgacaattccaagaacacgctgtatctgcaaatgaacagcctgcgtgccgaggacaccgcggtatattactgtgcgaaacttccgttttactttcaggagtggggtcagggaaccctggtcaccgtctccagc

SEQ ID NO: 1246 - DNA, 690 bp, Artificial Sequence
  Description of Artificial Sequence: Synthetic polynucleotide
gacatccagatgacccagtctccatcctccctgtctgcatctgtaggagaccgtgtcaccatcacttgccgggcaagtcgtccgattgggacgacgttaagttggtaccagcagaaaccagggaaagcccctaagctcctgatcctttggaattcccgtttgcaaagtggggtcccatcacgtttcagtggcagtggatctgggacagatttcactctcaccatcagcagtctgcaacctgaagattttgctacgtactactgtgcgcaggctgggacgcatcctacgacgttcggccaagggaccaaggtggaaatcaaacgtacggtggctgcaccatctgaggtgcagctgttggagtctgggggaggcttggtacagcctggggggtccctgcgtctctcctgtgcagcctccggattcacctttcgggattatgagatgtggtgggtccgccaggctccagggaagggtctagagcgggtctcagctattaatccgcagggtacgcgtacatactacgcagactccgtgaagggccggttcaccatctcccgcgacaattccaagaacacgctgtatctgcaaatgaacagcctgcgtgccgaggacaccgcggtatattactgtgcgaaacttccgttttactttcacgagtggggtcagggaaccctggtcaccgtctccagc

SEQ ID NO: 1247 - DNA, 690 bp, Artificial Sequence
  Description of Artificial Sequence: Synthetic polynucleotide
gacatccagatgacccagtctccatcctccctgtctgcatctgtaggagaccgtgtcaccatcacttgccgggcaagtcgtccgattgggacgatgttaagttggtaccagcagaaaccagggaaagcccctaagctcctgatccttgctttttcccgtttgcaaagtggggtcccatcacgtttcagtggcagtggatctgggacagatttcactctcaccatcagcagtctgcaacctgaagattttgctacgtactactgtgcgcaggctgggacgcatcatacgacgttcggccaagggaccaaggtggaaatcaaacgtacggtggctgcaccatctgaggtgcagctgttggagtctgggggaggcttggtacagcctggggggtccctgcgtctctcctgtgcagcctccggattcacctttcgggattatgagatgtggtgggtccgccaggctccagggaagggtctagagcgggtctcagctattaatccgcagggtacgcgtacatactacgcagactccgtgaagggccggttcaccatctcccgcgacaattccaagaacacgctgtatctgcaaatgaacagcctgcgtgccgaggacaccgcggtatattactgtgcgaaacttccgttttactttcacgagtggggtcagggaaccctggtcaccgtctccagc

SEQ ID NO: 1248 - DNA, 690 bp, Artificial Sequence
  Description of Artificial Sequence: Synthetic polynucleotide
gacatccagatgacccagtctccatcctccctgtctgcatctgtaggagaccgtgtcaccatcacttgccgggcaagtcgtccgattgggacgatgttaagttggtaccagcagaaaccagggaaagcccctaagctcctgatccttgctttttcccgtttgcaaagtggggtcccatcacgtttcagtggcagtggatctgggacagatttcactctcaccatcagcaatctgcaacctgaagattttgctacgtactactgcgcgcaggctgggacgcatcctacgacgttcggccaagggaccaaggtggaaatcaaacgtacggtggctgcaccatctgaggtgcagctgttggagtccgggggaggcttggtacagcctggggggtccctgcgtctctcctgtgcagcctccggattcacctttcgggattatgagatgtggtgggtccgccaggctccagggaagggtctagagcgggtctcagctattaatccgcagggtacgcgtacatactacgcagactccgtgaagggccggttcaccatctcccgcgacaattccaagaacacgctgtatctgcaaatgaacagcctgcgtgccgaggacaccgcggtatattactgtgcgaaacttccgttttactttcaggagtggggtcagggaaccctggtcaccgtctccagc

SEQ ID NO: 1249 - DNA, 690 bp, Artificial Sequence
  Description of Artificial Sequence: Synthetic polynucleotide
gacatccagatgacccagtctccatcctccctgtctgcatctgtaggagaccgtgtcaccatcacttgccgggcaagtcgtccgattgggacgatgttaagttggtaccagcagaaaccagggaaagcccctaagctcctgatccttgctttttcccgtttgcaaagtggggtcccatcacgtttcagtggcagtggatctgggacagatttcactctcaccatcagcagtctgcaacctgaagatgttgctacgtactactgtgcgcaggctgggacgcatcctacgacgttcggccaagggaccaaggtggaaatcaaacgtacggtggctgcaccatctgaggtgcagctgttggagtctgggggaggcttggtacagcctggggggtccctgcgtctctcctgtgcagcctccggattcacctttcgggattatgagatgtggtgggtccgccaggctccagggaagggtctagagcgggtctcagctattaatccgcagggtacgcgtacatactacgcagactccgtgaagggccggttcaccatctcccgcgacaattccaagaacacgctgtatctgcaaatgaacagcctgcgtgccgaggacaccgcggtatattactgtgcgaaacttccgttttactttcaggagtggggtcagggaaccctggtcaccgtctccagc

SEQ ID NO: 1250 - DNA, 690 bp, Artificial Sequence
  Description of Artificial Sequence: Synthetic polynucleotide
gacatccagatgacccagtctccatcctccctgtctgcatctgtaggagaccgtgtcaccatcacttgccgggcaagtcgtccgattgggacgatgttaagttggtaccagcagaaaccagggaaagcccctaagctcctgatccttgctttttcccgtttgcaaagtggggtcccatcacgtttcagtggcagtggatctgggacagatttcactctcaccatcagcagtctgcaacctgaagattttgctacgtactactgtgcgcaggctggggtgcatcctacgacgttcggccaagggaccaaggtggaaatcaaacgtacggtggctgcaccatctgaggtgcagctgttggagtctgggggaggcttggtacagcctggggggtccctgcgtctctcctgtgcagcctccggattcacctttcgggattatgagatgtggtgggtccgccaggctccagggaagggtctagagcgggtctcagctattaatccgcagggtacgcgtacatactacgcagactccgtgaagggccggttcaccatctcccgcgacaattccaagaacacgctgtatctgcaaatgaacagcctgcgtgccgaggacaccgcggtatattactgtgcgaaacttccgttttactttcaggagtggggtcagggaaccctggtcaccgtctccagc

SEQ ID NO: 1251 - DNA, 690 bp, Artificial Sequence
  Description of Artificial Sequence: Synthetic polynucleotide
gacatccagatgacccagtctccatcctccctgtctgcatctgtaggagaccgtgtcaccatcacttgccgggcaagtcgtccgattgggacgacgttaagttggtaccagcagaaaccagggaaagcccctaagctcctgatcctttggaattcccgtttgcaaagtggggtcccatcacgtttcagtggcagtggatctgggacagatttcactctcaccatcagcagtctgcaacctgaagattttgctacgtactactgtgcgcaggctgggacgcatcctacgacgttcggccaagggaccaaggtggaaatcaaacgtacggtggctgcaccatctgaggtgcagctgttggagtctgggggaggcttggtacagcctggggggtccctgcgtctctcctgcgcagcctccggattcacctttgaggaggaggagatgatttgggtccgccaggctccagggaagggtctagagtgggtctcagctattagtaggaacggttacagcacatactacgcagactccgtgaagggccggttcaccatctcccgcgacaattccaagaacacgctgtatctgcaaatgaacagcctgcgtgccgaggataccgcggtatattactgtgggaaagagccgtttcgttatgactactggggtcagggaaccctggtcaccgtctccagc

SEQ ID NO: 1252 - DNA, 681 bp, Artificial Sequence
  Description of Artificial Sequence: Synthetic polynucleotide
gaggtgcagctgttggagtctgggggaggcttggtacagcctggggggtccctgcgtctctcctgcgcagcctccggattcacctttgaggaggaggagatgatttgggtccgccaggctccagggaagggtctagagtgggtctcagctattagtaggaacggttacagcacatactacgcagactccgtgaagggccggttcaccatctcccgcgacaattccaagaacacgctgtatctgcaaatgaacagcctgcgtgccgaggataccgcggtatattactgtgggaaagagccgtttcgttatgactactggggtcagggaaccctggtcaccgtctcgagcgctagcaccgacatccagatgacccagtctccatcctccctgtctgcatctgtaggagaccgtgtcaccatcacttgccgggcaagtcgtccgattgggacgacgttaagttggtaccagcagaaaccagggaaagcccctaagctcctgatcctttggaattcccgtttgcaaagtggggtcccatcacgtttcagtggcagtggatctgggacagatttcactctcaccatcagcagtctgcaacctgaagattttgctacgtactactgtgcgcaggctgggacgcatcctacgacgttcggccaagggaccaaggtggaaatcaaacgg

SEQ ID NO: 1253 - DNA, 690 bp, Artificial Sequence
  Description of Artificial Sequence: Synthetic polynucleotide
gacatccagatgacccagtctccatcctccctgtctgcatctgtaggagaccgtgtcaccatcacttgccgggcaagtcagtggattgggtctcagttatcttggtaccagcagaaaccagggaaagcccctaagctcctgatcatgtggcgttcctcgttgcaaagtggggtcccatcacgtttcagtggcagtggatctgggacagatttcactctcaccatcagcagtctgcaacctgaagattttgctacgtactactgtgctcagggtttgaggcatcctaagacgttcggccaagggaccaaggtggaaatcaaacgtacggtggctgcaccatctgaggtgcagctgttggagtctgggggaggcttggtacagcctggggggtccctgcgtctctcctgcgcagcctccggattcacctttgaggaggaggagatgatttgggtccgccaggctccagggaagggtctagagtgggtctcagctattagtaggaacggttacagcacatactacgcagactccgtgaagggccggttcaccatctcccgcgacaattccaagaacacgctgtatctgcaaatgaacagcctgcgtgccgaggataccgcggtatattactgtgggaaagagccgtttcgttatgactactggggtcagggaaccctggtcaccgtctccagc

SEQ ID NO: 1254 - DNA, 681 bp, Artificial Sequence
  Description of Artificial Sequence: Synthetic polynucleotide
gaggtgcagctgttggagtctgggggaggcttggtacagcctggggggtccctgcgtctctcctgcgcagcctccggattcacctttgaggaggaggagatgatttgggtccgccaggctccagggaagggtctagagtgggtctcagctattagtaggaacggttacagcacatactacgcagactccgtgaagggccggttcaccatctcccgcgacaattccaagaacacgctgtatctgcaaatgaacagcctgcgtgccgaggataccgcggtatattactgtgggaaagagccgtttcgttatgactactggggtcagggaaccctggtcaccgtctcgagcgctagcaccgacatccagatgacccagtctccatcctccctgtctgcatctgtaggagaccgtgtcaccatcacttgccgggcaagtcagtggattgggtctcagttatcttggtaccagcagaaaccagggaaagcccctaagctcctgatcatgtggcgttcctcgttgcaaagtggggtcccatcacgtttcagtggcagtggatctgggacagatttcactctcaccatcagcagtctgcaacctgaagattttgctacgtactactgtgctcagggtttgaggcatcctaagacgttcggccaagggaccaaggtggaaatcaaacgg

SEQ ID NO: 1255 - DNA, 681 bp, Artificial Sequence
  Description of Artificial Sequence: Synthetic polynucleotide
gaggtgcagctgttggcgtctgggggaggcttggtacagcctggggggtccctgcgtctctcctgcgcagcctccggattcacctttgaggaggaggagatgatttgggtccgccaggctccagggaagggtctagagtgggtctcagctattagtaggaacggttacagcacatactacgcagactccgtgaagggccggttcaccatctcccgcgacaattccaagaacacgctgtatctgcaaatgaacagcctgcgtgccgaggataccgcggtatattactgtgggaaagagccgtttcgttatgactactggggtcagggaaccctggtcaccgtctcgagcgcttcaaccgacatccagatgacccagtctccatcctccctgtctgcatctgtaggagaccgtgtcaccatcacttgccgggcaagtcgtccgattgggacgacgttaagttggtaccagcagaaaccagggaaagcccctaagctcctgatcctttggaattcccgtttgcaaagtggggtcccatcacgtttcagtggcagtggatctgggacagatttcactctcaccatcagcagtctgcaacctgaagattttgctacgtactactgtgcgcaggctgggacgcatcctacgacgttcggccaagggaccaaggtggaaatcaaacgg

SEQ ID NO: 1256 - DNA, 681 bp, Artificial Sequence
  Description of Artificial Sequence: Synthetic polynucleotide
gaggtgcagctgttggcgtctgggggaggcttggtacagcctggggggtccctgcgtctctcctgcgcagcctccggattcacctttgaggaggaggagatgatttgggtccgccaggccccagggaagggtctagagtgggtctcagctattagtaggaacggttacagcacatactacgcagactccgtgaagggccggttcaccatctcccgcgacaattccaagaacacgctgtatctgcaaatgaacagcctgcgtgccgaggataccgcggtatattactgtgggaaagagccgtttcgttatgactactggggtcagggaaccctggtcaccgtctcgagcgcttcaaccgacatccagatgacccagtctccatcctccctgtctgcatctgtaggagaccgtgtcaccatcacttgccgggcaagtcgtccgattgggacgatgttaagttggtaccagcagaaaccagggaaagcccctaagctcctgatccttgctttttcccgtttgcaaagtggggtcccatcacgtttcagtggcagtggatctgggacagatttcactctcaccatcagcaatctgcaacctgaagattttgctacgtactactgcgcgcaggctgggacgcatcctacgacgttcggccaagggaccaaggtggaaatcaaacgg

SEQ ID NO: 1257 - DNA, 690 bp, Artificial Sequence
  Description of Artificial Sequence: Synthetic polynucleotide
gacatccagatgacccagtctccatcctccctgtctgcatctgtaggagaccgtgtcaccatcacttgccgggcaagtcgtccgattgggacgacgttaagttggtaccagcagaaaccagggaaagcccctaagctcctgatcctttggaattcccgtttgcaaagtggggtcccatcacgtttcagtggcagtggatctgggacagatttcactctcaccatcagcagtctgcaacctgaagattttgctacgtactactgtgcgcaggctgggacgcatcctacgacgttcggccaagggaccaaggtggaaatcaaacggaccgtggcggcgccgagtgaggtgcagctgttggcgtctgggggaggcttggtacagcctggggggtccctgcgtctctcctgcgcagcctccggattcacctttgaggaggaggagatgatttgggtccgccaggctccagggaagggtctagagtgggtctcagctattagtaggaacggttacagcacatactacgcagactccgtgaagggccggttcaccatctcccgcgacaattccaagaacacgctgtatctgcaaatgaacagcctgcgtgccgaggataccgcggtatattactgtgggaaagagccgtttcgttatgactactggggtcagggaaccctggtcaccgtctccagc

SEQ ID NO: 1258 - DNA, 690 bp, Artificial Sequence
  Description of Artificial Sequence: Synthetic polynucleotide
gacatccagatgacccagtctccatcctccctgtctgcatctgtaggagaccgtgtcaccatcacttgccgggcaagtcgtccgattgggacgatgttaagttggtaccagcagaaaccagggaaagcccctaagctcctgatccttgctttttcccgtttgcaaagtggggtcccatcacgtttcagtggcagtggatctgggacagatttcactctcaccatcagcaatctgcaacctgaagattttgctacgtactactgcgcgcaggctgggacgcatcctacgacgttcggccaagggaccaaggtggaaatcaaacggaccgtggcggcgccgagtgaggtgcaactgttggcgtctgggggaggcttggtacagcctggggggtccctgcgtctctcctgcgcagcctccggattcacctttgaggaggaggagatgatttgggtccgccaggctccagggaagggtctagagtgggtctcagctattagtaggaacggttacagcacatactacgcagactccgtgaagggccggttcaccatctcccgcgacaattccaagaacacgctgtatctgcaaatgaacagcctgcgtgccgaggataccgcggtatattactgtgggaaagagccgtttcgttatgactactggggtcagggaaccctggtcaccgtctccagc

SEQ ID NO: 1259 - DNA, 681 bp, Artificial Sequence
  Description of Artificial Sequence: Synthetic polynucleotide
gacatccagatgacccagtctccatcctccctgtctgcatctgtaggagaccgtgtcaccatcacttgccgggcaagtcgtccgattgggacgatgttaagttggtaccagcagaaaccagggaaagcccctaagctcctgatccttgctttttcccgtttgcaaagtggggtcccatcacgtttcagtggcagtggatctgggacagatttcactctcaccatcagcaatctgcaacctgaagattttgctacgtactactgcgcgcaggctgggacgcatcctacgacgttcggccaagggaccaaggtggaaatcaaacgtacggtggcggaggtgcagctgttggagtctgggggaggcttggtacagcctggggggtccctgcgtctctcctgtgcagcctccggattcacctttcgggattatgagatgtggtgggtccgccaggctccagggaagggtctagagcgggtctcagctattaatccgcagggtacgcgtacatactacgcagactccgtgaagggccggttcaccatctcccgcgacaattccaagaacacgctgtatctgcaaatgaacagcctgcgtgccgaggacaccgcggtatattactgtgcgaaacttccgttttactttcacgagtggggtcagggaaccctggtcaccgtctccagc

SEQ ID NO: 1260 - DNA, 693 bp, Artificial Sequence
  Description of Artificial Sequence: Synthetic polynucleotide
gacatccagatgacccagtctccatcctccctgtctgcatctgtaggagaccgtgtcaccatcacttgccgggcaagtcgtccgattgggacgatgttaagttggtaccagcagaaaccagggaaagcccctaagctcctgatccttgctttttcccgtttgcaaagtggggtcccatcacgtttcagtggcagtggatctgggacagatttcactctcaccatcagcaatctgcaacctgaagattttgctacgtactactgcgcgcaggctgggacgcatcctacgacgttcggccaagggaccaaggtggaaatcaaacgggctagcacctcaggtccatcggaggtgcagctgttggagtctgggggaggcttggtacagcctggggggtccctgcgtctctcctgtgcagcctccggattcacctttcgggattatgagatgtggtgggtccgccaggctccagggaagggtctagagcgggtctcagctattaatccgcagggtacgcgtacatactacgcagactccgtgaagggccggttcaccatctcccgcgacaattccaagaacacgctgtatctgcaaatgaacagcctgcgtgccgaggacaccgcggtatattactgtgcgaaacttccgttttactttcacgagtggggtcagggaaccctggtcaccgtctccagc

SEQ ID NO: 1261 - DNA, 687 bp, Artificial Sequence
  Description of Artificial Sequence: Synthetic polynucleotide
gacatccagatgacccagtctccatcctccctgtctgcatctgtaggagaccgtgtcaccatcacttgccgggcaagtcgtccgattgggacgatgttaagttggtaccagcagaaaccagggaaagcccctaagctcctgatccttgctttttcccgtttgcaaagtggggtcccatcacgtttcagtggcagtggatctgggacagatttcactctcaccatcagcaatctgcaacctgaagattttgctacgtactactgcgcgcaggctgggacgcatcctacgacgttcggccaagggaccaaggtggaaatcaaacggggtggaggtggctctgaggtgcagctgttggagtctgggggaggcttggtacagcctggggggtccctgcgtctctcctgtgcagcctccggattcacctttcgggattatgagatgtggtgggtccgccaggctccagggaagggtctagagcgggtctcagctattaatccgcagggtacgcgtacatactacgcagactccgtgaagggccggttcaccatctcccgcgacaattccaagaacacgctgtatctgcaaatgaacagcctgcgtgccgaggacaccgcggtatattactgtgcgaaacttccgttttactttcacgagtggggtcagggaaccctggtcaccgtctccagc

SEQ ID NO: 1262 - DNA, 717 bp, Artificial Sequence
  Description of Artificial Sequence: Synthetic polynucleotide
gacatccagatgacccagtctccatcctccctgtctgcatctgtaggagaccgtgtcaccatcacttgccgggcaagtcgtccgattgggacgatgttaagttggtaccagcagaaaccagggaaagcccctaagctcctgatccttgctttttcccgtttgcaaagtggggtcccatcacgtttcagtggcagtggatctgggacagatttcactctcaccatcagcaatctgcaacctgaagattttgctacgtactactgcgcgcaggctgggacgcatcctacgacgttcggccaagggaccaaggtggaaatcaaacggggtggaggtggctctggaggtggcggtagcggcggaggcggttcagaggtgcagctgttggagtctgggggaggcttggtacagcctggggggtccctgcgtctctcctgtgcagcctccggattcacctttcgggattatgagatgtggtgggtccgccaggctccagggaagggtctagagcgggtctcagctattaatccgcagggtacgcgtacatactacgcagactccgtgaagggccggttcaccatctcccgcgacaattccaagaacacgctgtatctgcaaatgaacagcctgcgtgccgaggacaccgcggtatattactgtgcgaaacttccgttttactttcacgagtggggtcagggaaccctggtcaccgtctccagc

SEQ ID NO: 1263 - DNA, 747 bp, Artificial Sequence
  Description of Artificial Sequence: Synthetic polynucleotide
gacatccagatgacccagtctccatcctccctgtctgcatctgtaggagaccgtgtcaccatcacttgccgggcaagtcgtccgattgggacgatgttaagttggtaccagcagaaaccagggaaagcccctaagctcctgatccttgctttttcccgtttgcaaagtggggtcccatcacgtttcagtggcagtggatctgggacagatttcactctcaccatcagcaatctgcaacctgaagattttgctacgtactactgcgcgcaggctgggacgcatcctacgacgttcggccaagggaccaaggtggaaatcaaacggggtggaggtggctctggaggtggcggtagcggcggtggcggttcaggtggcggaggttctggaggcggtggatctgaggtgcagctgttggagtctgggggaggcttggtacagcctggggggtccctgcgtctctcctgtgcagcctccggattcacctttcgggattatgagatgtggtgggtccgccaggctccagggaagggtctagagcgggtctcagctattaatccgcagggtacgcgtacatactacgcagactccgtgaagggccggttcaccatctcccgcgacaattccaagaacacgctgtatctgcaaatgaacagcctgcgtgccgaggacaccgcggtatattactgtgcgaaacttccgttttactttcacgagtggggtcagggaaccctggtcaccgtctccagc

SEQ ID NO: 1264 - DNA, 681 bp, Artificial Sequence
  Description of Artificial Sequence: Synthetic polynucleotide
gaggtgcagctgttggagtctgggggaggcttggtacagcctggggggtccctgcgtctctcctgtgcagcctccggattcacctttcgggattatgagatgtggtgggtccgccaggctccagggaagggtctagagcgggtctcagctattaatccgcagggtacgcgtacatactacgcagactccgtgaagggccggttcaccatctcccgcgacaattccaagaacacgctgtatctgcaaatgaacagcctgcgtgccgaggacaccgcggtatattactgtgcgaaacttccgttttactttcacgagtggggtcagggaaccctggtcaccgtttcgagcacggtggcggacatccagatgacccagtctccatcctccctgtctgcatctgtaggagaccgtgtcaccatcacttgccgggcaagtcgtccgattgggacgatgttaagttggtaccagcagaaaccagggaaagcccctaagctcctgatccttgctttttcccgtttgcaaagtggggtcccatcacgtttcagtggcagtggatctgggacagatttcactctcaccatcagcaatctgcaacctgaagattttgctacgtactactgcgcgcaggctgggacgcatcctacgacgttcggccaagggaccaaggtggaaatcaaacgg

SEQ ID NO: 1265 - DNA, 693 bp, Artificial Sequence
  Description of Artificial Sequence: Synthetic polynucleotide
gaggtgcagctgttggagtctgggggaggcttggtacagcctggggggtccctgcgtctctcctgtgcagcctccggattcacctttcgggattatgagatgtggtgggtccgccaggctccagggaagggtctagagcgggtctcagctattaatccgcagggtacgcgtacatactacgcagactccgtgaagggccggttcaccatctcccgcgacaattccaagaacacgctgtatctgcaaatgaacagcctgcgtgccgaggacaccgcggtatattactgtgcgaaacttccgttttactttcacgagtggggtcagggaaccctggtcaccgtctcgagcgctagcacctcaggtccatcggacatccagatgacccagtctccatcctccctgtctgcatctgtaggagaccgtgtcaccatcacttgccgggcaagtcgtccgattgggacgatgttaagttggtaccagcagaaaccagggaaagcccctaagctcctgatccttgctttttcccgtttgcaaagtggggtcccatcacgtttcagtggcagtggatctgggacagatttcactctcaccatcagcaatctgcaacctgaagattttgctacgtactactgcgcgcaggctgggacgcatcctacgacgttcggccaagggaccaaggtggaaatcaaacgg

SEQ ID NO: 1266 - DNA, 687 bp, Artificial Sequence
  Description of Artificial Sequence: Synthetic polynucleotide
gaggtgcagctgttggagtctgggggaggcttggtacagcctggggggtccctgcgtctctcctgtgcagcctccggattcacctttcgggattatgagatgtggtgggtccgccaggctccagggaagggtctagagcgggtctcagctattaatccgcagggtacgcgtacatactacgcagactccgtgaagggccggttcaccatctcccgcgacaattccaagaacacgctgtatctgcaaatgaacagcctgcgtgccgaggacaccgcggtatattactgtgcgaaacttccgttttactttcacgagtggggtcagggaaccctggtcaccgtctcgagcggtggaggcggctctgacatccagatgacccagtctccatcctccctgtctgcatctgtaggagaccgtgtcaccatcacttgccgggcaagtcgtccgattgggacgatgttaagttggtaccagcagaaaccagggaaagcccctaagctcctgatccttgctttttcccgtttgcaaagtggggtcccatcacgtttcagtggcagtggatctgggacagatttcactctcaccatcagcaatctgcaacctgaagattttgctacgtactactgcgcgcaggctgggacgcatcctacgacgttcggccaagggaccaaggtggaaatcaaacgg

SEQ ID NO: 1267 - DNA, 717 bp, Artificial Sequence
  Description of Artificial Sequence: Synthetic polynucleotide
gaggtgcagctgttggagtctgggggaggcttggtacagcctggggggtccctgcgtctctcctgtgcagcctccggattcacctttcgggattatgagatgtggtgggtccgccaggctccagggaagggtctagagcgggtctcagctattaatccgcagggtacgcgtacatactacgcagactccgtgaagggccggttcaccatctcccgcgacaattccaagaacacgctgtatctgcaaatgaacagcctgcgtgccgaggacaccgcggtatattactgtgcgaaacttccgttttactttcacgagtggggtcagggaaccctggtcaccgtctcgagcggtggaggtggctctggaggtggcggtagcggcggtggcggttcagacatccagatgacccagtctccatcctccctgtctgcatctgtaggagaccgtgtcaccatcacttgccgggcaagtcgtccgattgggacgatgttaagttggtaccagcagaaaccagggaaagcccctaagctcctgatccttgctttttcccgtttgcaaagtggggtcccatcacgtttcagtggcagtggatctgggacagatttcactctcaccatcagcaatctgcaacctgaagattttgctacgtactactgcgcgcaggctgggacgcatcctacgacgttcggccaagggaccaaggtggaaatcaaacgg

SEQ ID NO: 1268 - DNA, 747 bp, Artificial Sequence
  Description of Artificial Sequence: Synthetic polynucleotide
gaggtgcagctgttggagtctgggggaggcttggtacagcctggggggtccctgcgtctctcctgtgcagcctccggattcacctttcgggattatgagatgtggtgggtccgccaggctccagggaagggtctagagcgggtctcagctattaatccgcagggtacgcgtacatactacgcagactccgtgaagggccggttcaccatctcccgcgacaattccaagaacacgctgtatctgcaaatgaacagcctgcgtgccgaggacaccgcggtatattactgtgcgaaacttccgttttactttcacgagtggggtcagggaaccctggtcaccgtctcgagcggtggaggtggctctggaggtggcggtagcggcggtggcggttcaggtggcggaggttctggaggcggtggatctgacatccagatgacccagtctccatcctccctgtctgcatctgtaggagaccgtgtcaccatcacttgccgggcaagtcgtccgattgggacgatgttaagttggtaccagcagaaaccagggaaagcccctaagctcctgatccttgctttttcccgtttgcaaagtggggtcccatcacgtttcagtggcagtggatctgggacagatttcactctcaccatcagcaatctgcaacctgaagattttgctacgtactactgcgcgcaggctgggacgcatcctacgacgttcggccaagggaccaaggtggaaatcaaacgg

SEQ ID NO: 1269 - DNA, 690 bp, Artificial Sequence
  Description of Artificial Sequence: Synthetic polynucleotide
gacatccagatgacccagtctccatcctccctgtctgcatctgtaggagaccgtgtcaccatcacttgccgggcaagtcgtccgattgggacgatgttaagttggtaccagcagaaaccagggaaagcccctaagctcctgatccttgctttttcccgtttgcaaagtggggtcccatcacgtttcagtggcagtggatctgggacagatttcactctcaccatcagcaatctgcaacctgaagattttgctacgtactactgcgcgcaggctgggacgcatcctacgacgttcggccaagggaccaaggtggaaatcaaacggaccgtagcggcgccgagtgaggtgcagctgttggagtctgggggaggcttggtacagcctggggggtccctgcgtctctcctgtgcagcctccggattcacctttcgggattatgagatgtggtgggtccgccaggctccagggaagggtctagagcgggtctcagctattaatccgcagggtacgcgtacatactacgcagactccgtgaagggccggttcaccatctcccgcgacaattccaagaacacgctgtatctgcaaatgaacagcctgcgtgccgaggacaccgcggtatattactgtgcgaaacttccgttttactttcacgagtggggtcagggaaccctggtcaccgtctccagc

SEQ ID NO: 1270 - protein, 44 aa, Artificial Sequence
  Description of Artificial Sequence: Synthetic polypeptide
CSPGFGVKQIATGVSDTICEPCPVGFFSNVSSAFEKCHPWTSCE

SEQ ID NO: 1271 - protein, 44 aa, Artificial Sequence
  Description of Artificial Sequence: Synthetic polypeptide
CSPGYRVKEACGELTGTVCEPCPPGTYIAHLNGLSKCLQCQMCD

SEQ ID NO: 1272 - protein, 44 aa, Artificial Sequence
  Description of Artificial Sequence: Synthetic polypeptide
CQPGQKLVSDCTEFTETECLPCGESEFLDTWNRETHCHQHKYCD

SEQ ID NO: 1273 - protein, 19 aa, Artificial Sequence
  Description of Artificial Sequence: Synthetic peptide
DPGGGGGRLVPRGFGTGDP

SEQ ID NO: 1274 - protein, 5 aa, Artificial Sequence
  Description of Artificial Sequence: Synthetic peptide
  MOD_RES (1)..(1): Asp or Gly
  MOD_RES (4)..(4): Met or Leu
XYEXW

SEQ ID NO: 1275 - protein, 17 aa, Artificial Sequence
  Description of Artificial Sequence: Synthetic peptide
  MOD_RES (5)..(5): Gln, Tyr, Pro, Trp or Ala
  MOD_RES (7)..(7): Thr, Ser, Asn, Gly, Met or Gln
  MOD_RES (8)..(8): Arg, Leu, Tyr, His or Phe
  MOD_RES (16)..(16): Lys or Met
AINPXGXXTYYADSVXG

SEQ ID NO: 1276 - protein, 7 aa, Artificial Sequence
  Description of Artificial Sequence: Synthetic peptide
  MOD_RES (1)..(1): Leu or Pro
  MOD_RES (3)..(3): Phe, Gln, Thr or Met
  MOD_RES (4)..(4): Tyr, Pro, Leu, Thr, Ile, Phe or Met
  MOD_RES (6)..(6): Gln, His, Asp, Ser, Lys, Glu or Gly
  MOD_RES (7)..(7): Glu, Asp or Tyr
XPXXFXX

SEQ ID NO: 1277 - protein, 30 aa, Artificial Sequence
  Description of Artificial Sequence: Synthetic polypeptide
  MOD_RES (18)..(18): Leu or Arg
  MOD_RES (30)..(30): Arg or Ala
EVQLLESGGGLVQPGGSXRLSCAASGFTFX

SEQ ID NO: 1278 - protein, 14 aa, Artificial Sequence
  Description of Artificial Sequence: Synthetic peptide
  MOD_RES (4)..(4): Gln or Arg
  MOD_RES (8)..(8): Lys or Arg
  MOD_RES (9)..(9): Gly or Val
WVRXAPGXXLERVS

SEQ ID NO: 1279 - protein, 32 aa, Artificial Sequence
  Description of Artificial Sequence: Synthetic polypeptide
  MOD_RES (12)..(12): Thr or Met
  MOD_RES (23)..(23): Glu or Asp
  MOD_RES (26)..(26): Ala or Ser
  MOD_RES (29)..(29): Tyr or His
  MOD_RES (31)..(31): Ala or Thr
RFTISRDNSKNXKYLQMNSLRAXDTXVYXCXK

SEQ ID NO: 1280 - protein, 11 aa, Artificial Sequence
  Description of Artificial Sequence: Synthetic peptide
  MOD_RES (1)..(1): Trp or Arg
  MOD_RES (3)..(3): Gln or Pro
  MOD_RES (11)..(11): Ser or Asn
XGXGTLVTVSX

SEQ ID NO: 1281 - protein, 116 aa, Artificial Sequence
  Description of Artificial Sequence: Synthetic polypeptide
  MOD_RES (13)..(13): Gln or Arg
  MOD_RES (99)..(99): Glu or Gly
  MOD_RES (101)..(101): Ala, Leu or Glu
  MOD_RES (102)..(102): Phe or Tyr
  MOD_RES (106)..(106): Trp or Arg
EVQLLESGGGLVXPGGSLRLSCAASGFTFEWYEMQWVRRAPGKGLEWVSAISGDGYRTYYADSVKGRFTISRDNSKNTLYLQMNSLRAEDTAVYYCAKXLXXFDYXGRGTLVTVSS

SEQ ID NO: 1282 - protein, 116 aa, Artificial Sequence
  Description of Artificial Sequence: Synthetic polypeptide
  MOD_RES (28)..(28): Thr or Pro
  MOD_RES (50)..(50): Ala or Ser
  MOD_RES (53)..(53): Arg or Gly
  MOD_RES (54)..(54): Arg, Ser, Asn, Gln, Gly, His or Leu
  MOD_RES (56)..(56): Tyr, Phe, Trp or Gly
  MOD_RES (57)..(57): Ser or Gly
  MOD_RES (102)..(102): Arg, Met or Pro
EVQLLASGGGLVQPGGSLRLSCAASGFXFEEEEMIWVRQAPGKGLEWVSXISXXGXXTYYADSVKGRFTISRDNSKNTLYLQMNSLRAEDTAVYYCGKEPFXYDYWGQGTLVTVSS

SEQ ID NO: 1283 - protein, 118 aa, Artificial Sequence
  Description of Artificial Sequence: Synthetic polypeptide
  MOD_RES (36)..(36): Met or Leu
  MOD_RES (39)..(39): Val or Phe
  MOD_RES (76)..(76): Asp or Asn
  MOD_RES (77)..(77): Ser or Thr
  MOD_RES (97)..(97): Tyr or His
  MOD_RES (100)..(100): Lys or Arg
  MOD_RES (101)..(101): Asp or Glu
  MOD_RES (105)..(105): Tyr or Phe
  MOD_RES (108)..(108): Trp or Arg
  MOD_RES (109)..(109): Gly or Arg
  MOD_RES (110)..(110): Gln or His
EVQLLESGGGLVQPGGSLRLSCAASGFTFAGTRYEXWWXRQAPGKGLERVSAISGSGGSTYYADSVKGRFTISRDXXKNTLYLQMNSLRAEDTAVYXCAXXPYSXDYXXXGTLVTVSS

SEQ ID NO: 1284 - protein, 232 aa, Artificial Sequence
  Description of Artificial Sequence: Synthetic polypeptide
EPKSSDKTHTSPPSPAPELLGGSSVFLFPPKPKDTLMISRTPEVTCVVVDVSHEDPEVKFNWYVDGVEVHNAKTKPREEQYNSTYRVVSVLTVLHQDWLNGKEYKCKVSNKALPAPIEKTISKAKGQPREPQVYTLPPSRDELTKNQVSLTCLVKGFYPSDIAVEWESNGQPENNYKTTPPVLDSDGSFFLYSKLTVDKSRWQQGNVFSCSVMHEALHNHYTQKSLSLSPGK

SEQ ID NO: 1285 - protein, 229 aa, Artificial Sequence
  Description of Artificial Sequence: Synthetic polypeptide
ESKYGPPCPPCPAPEFLGGPSVFLFPPKPKDTLMISRTPEVTCVVVDVSQEDPEVQFNWYVDGVEVHNAKTKPREEQFNSTYRVVSVLTVLHQDWLNGKEYKCKVSNKGLPSSIEKTISKAKGQPREPQVYTLPPSQEEMTKNQVSLTCLVKGFYPSDIAVEWESNGQPENNYKTTPPVLDSDGSFFLYSRLTVDKSRWQEGNVFSCSVMHEALHNHYTQKSLSLSLGK

SEQ ID NO: 1286 - protein, 351 aa, Artificial Sequence
  Description of Artificial Sequence: Synthetic polypeptide
EVQLLESGGGLVQPGGSLRLSCAASGFTFRDYEMWWVRQAPGKGLERVSAINPQGTRTYYADSVKGRFTISRDNSKNTLYLQMNSLRAEDTAVYYCAKLPFRFSDRGQGTLVTVSSASTEPKSSDKTHTSPPSPAPELLGGSSVFLFPPKPKDTLMISRTPEVTCVVVDVSHEDPEVKFNWYVDGVEVHNAKTKPREEQYNSTYRVVSVLTVLHQDWLNGKEYKCKVSNKALPAPIEKTISKAKGQPREPQVYTLPPSRDELTKNQVSLTCLVKGFYPSDIAVEWESNGQPENNYKTTPPVLDSDGSFFLYSKLTVDKSRWQQGNVFSCSVMHEALHNHYTQKSLSLSPGK

SEQ ID NO: 1287 - protein, 348 aa, Artificial Sequence
  Description of Artificial Sequence: Synthetic polypeptide
EVQLLESGGGLVQPGGSLRLSCAASGFTFRDYEMWWVRQAPGKGLERVSAINPQGTRTYYADSVKGRFTISRDNSKNTLYLQMNSLRAEDTAVYYCAKLPFRFSDRGQGTLVTVSSASTESKYGPPCPPCPAPEFLGGPSVFLFPPKPKDTLMISRTPEVTCVVVDVSQEDPEVQFNWYVDGVEVHNAKTKPREEQFNSTYRVVSVLTVLHQDWLNGKEYKCKVSNKGLPSSIEKTISKAKGQPREPQVYTLPPSQEEMTKNQVSLTCLVKGFYPSDIAVEWESNGQPENNYKTTPPVLDSDGSFFLYSRLTVDKSRWQEGNVFSCSVMHEALHNHYTQKSLSLSLGK

1-32. (canceled)

33. An antibody polypeptide comprising a first variable domain, wherein said antibody polypeptide specifically binds an epitope of human CD40, wherein the antibody polypeptide competes with the binding of domain antibody (dAb) BMS3h-56-269 (SEQ ID NO: 417) to CD40, wherein CD40 comprises the amino acid sequence of SEQ ID NO: 1, and wherein the epitope comprises at least one CD40 amino acid residue selected from the group consisting of Trp109, Leu121, His122, Ser124, Ser156, Ala157, Phe158, Glu159, and His162.

34. The antibody polypeptide of claim 33, wherein the first variable domain comprises the amino acid sequence of one of the antibody polypeptides selected from the lineage group consisting of BMS3h-56, and wherein the first variable domain has an apparent binding constant of 1 pM to 100 nM.

35. The antibody polypeptide of claim 33, wherein the first variable domain comprises the amino acid sequence of one of the antibody polypeptides selected from the lineage group consisting of BMS3h-56, and wherein the first variable domain has a hIZCD40L-driven Human B Cell Proliferation EC50 of 0.01 nM to 100.0 nM.

36. The antibody polypeptide of claim 33, wherein the amino acid sequence of the first variable domain comprises
(a) a CDR1 region which differs from the CDR1 region of BMS3h-56-269 (SEQ ID NO: 417) by up to two amino acids,
(b) a CDR2 region which differs from the CDR2 region of BMS3h-56-269 (SEQ ID NO: 417) by up to two amino acids,
(c) a CDR3 region which differs from the CDR3 region of BMS3h-56-269 (SEQ ID NO: 417) by up to two amino acids,
(d) a FR1 region which differs from the FR1 region of BMS3h-56-269 (SEQ ID NO: 417) by up to two amino acids,
(e) a FR2 region which differs from the FR2 region of BMS3h-56-269 (SEQ ID NO: 417) by up to two amino acids,
(f) a FR3 region which differs from the FR3 region of BMS3h-56-269 (SEQ ID NO: 417) by up to two amino acids, and
(g) a FR4 region which differs from the FR4 region of BMS3h-56-269 (SEQ ID NO: 417) by up to two amino acids.

37. The antibody polypeptide of claim 33, wherein the amino acid sequence of the first variable domain comprises
(a) a CDR1 region which differs from the CDR1 region of BMS3h-56-269 (SEQ ID NO: 417) by up to two amino acids,
(b) a CDR2 region which differs from the CDR2 region of BMS3h-56-269 (SEQ ID NO: 417) by up to two amino acids,
(c) a CDR3 region which differs from the CDR3 region of BMS3h-56-269 (SEQ ID NO: 417) by up to two amino acids.

38. The antibody polypeptide of claim 38, wherein the amino acid sequence of the first variable domain comprises
(a) a CDR1 region comprising the CDR1 region of BMS3h-56-269 (SEQ ID NO: 417),
(b) a CDR2 region comprising the CDR2 region of BMS3h-56-269 (SEQ ID NO: 417), and
(c) a CDR3 region comprising the CDR3 region of BMS3h-56-269 (SEQ ID NO: 417).

39. The antibody polypeptide of claim 38, wherein the amino acid sequence of the first variable domain comprises
(d) a FR1 region comprising the FR1 region of BMS3h-56-269 (SEQ ID NO: 417),
(e) a FR2 region comprising the FR2 region of BMS3h-56-269 (SEQ ID NO: 417),
(f) a FR3 region comprising the FR3 region of BMS3h-56-269 (SEQ ID NO: 417), and
(g) a FR4 region comprising the FR4 region of BMS3h-56-269 (SEQ ID NO: 417).

40. The antibody polypeptide of claim 33, wherein the amino acid sequence of the first variable domain differs from the amino acid sequence of BMS3h-56-258 (SEQ ID NO: 10) or BMS3h-56-269 (SEQ ID NO: 417) by up to 10 amino acids, preferably by up to 5 amino acids, preferably by up to 2 amino acids, preferably by 1 amino acid.

41. The antibody polypeptide of claim 40, wherein the amino acid sequence of the first variable domain comprises BMS3h-56-258 (SEQ ID NO: 10) or BMS3h-56-269 (SEQ ID NO: 417).

42. The antibody polypeptide of claim 34, wherein the antibody polypeptide is selected from the lineage group of BMS3h-56, and wherein the amino acid sequence of the first variable domain further comprises:
(a) a CDR1 region having a sequence X₁-Tyr-Glu-Y₁-Trp (SEQ ID NO: 1274), wherein X₁ is Asp or Gly, and Y₁ is Met or Leu;
(b) a CDR2 region having a sequence Ala-Ile-Asn-Pro-X₂-Gly-Y₂-Z₂-Thr-Tyr-Tyr-Ala-Asp-Ser-Val-A₂-Gly (SEQ ID NO: 1275), wherein X₂ is Gln, Tyr, Pro, Trp, or Ala, Y₂ is Thr, Ser, Asn, Gly, Met, or Gln, Z₂ is Arg, Leu, Tyr, His, or Phe, and A₂ is Lys or Met; and
(c) a CDR3 region having a sequence X₃-Pro-Y₃-Z₃-Phe-A₃-B₃ (SEQ ID NO: 1276), wherein X₃ is Leu or Pro, Y₃ is Phe, Gln, Thr, or Met, Z₃ is Tyr, Pro, Leu, Thr, Ile, Phe, or Met, A₃ is Gln, His, Asp, Ser, Lys, Glu, or Gly, and B₃ is Glu, Asp, or Tyr.

43. The antibody polypeptide of claim 42, wherein the amino acid sequence of the first variable domain comprises:
(a) a FR1 region having a sequence Glu-Val-Gln-Leu-Leu-Glu-Ser-Gly-Gly-Gly-Leu-Val-Gln-Pro-Gly-Gly-Ser-X₁-Arg-Leu-Ser-Cys-Ala-Ala-Ser-Gly-Phe-Thr-Phe-Y₁ (SEQ ID NO: 1277), wherein X₁ is Leu or Arg, and Y₁ is Arg or Ala;
(b) a FR2 region having a sequence Trp-Val-Arg-X₂-Ala-Pro-Gly-Y₂-Z₂-Leu-Glu-Arg-Val-Ser (SEQ ID NO: 1278), wherein X₂ is Gln or Arg, Y₂ is Lys or Arg, and Z₂ is Gly or Val;
(c) a FR3 region having a sequence Arg-Phe-Thr-Ile-Ser-Arg-Asp-Asn-Ser-Lys-Asn-X₃-Lys-Tyr-Leu-Gln-Met-Asn-Ser-Leu-Arg-Ala-Y₃-Asp-Thr-Z₃-Val-Tyr-A₃-Cys-B₃-Lys (SEQ ID NO: 1279), wherein X₃ is Thr or Met, Y₃ is Glu or Asp, Z₃ is Ala or Ser, A₃ is Tyr or His, and B₃ is Ala or Thr; and
(d) a FR4 region having a sequence X₄-Gly-Y₄-Gly-Thr-Leu-Val-Thr-Val-Ser-Z₄ (SEQ ID NO: 1280), wherein X₄ is Trp or Arg, Y₄ is Gln or Pro, and Z₄ is Ser or Asn.

44. The antibody polypeptide of claim 34, wherein the first variable domain comprises the amino acid sequence of BMS3h-56-258 (SEQ ID NO: 10) or BMS3h-56-269 (SEQ ID NO: 417).

45. The antibody polypeptide of claim 33, wherein the antibody polypeptide is a domain antibody (dAb).

46. The antibody polypeptide of claim 33, wherein the antibody polypeptide is a fusion polypeptide comprising the first variable domain and an Fc domain.

47. The antibody polypeptide of claim 46, wherein the antibody polypeptide comprises the BMS3h-56-269-IgG1* Fc fusion polypeptide of SEQ ID NO: 1286.

48. The antibody polypeptide of claim 46, wherein the antibody polypeptide comprises the BMS3h-56-269-IgG4 Fc fusion polypeptide of SEQ ID NO: 1287.

49. The antibody polypeptide of claim 33, wherein the antibody polypeptide further comprises a second variable domain that specifically binds a second antigen, wherein the second antigen is an antigen other than human CD40.

50. A nucleic acid encoding the antibody polypeptide of claim 33.

51. An isolated host cell comprising the nucleic acid of claim 50.

52. A pharmaceutical composition comprising a therapeutically-effective amount of the antibody polypeptide of claim 33 and a pharmaceutically acceptable carrier.

53. A method of treating an immune disease in a patient in need of such treatment, comprising administering to the patient a therapeutically effective amount of the pharmaceutical composition of claim 52.

54. The method of claim 53, wherein the immune disease is selected from the group consisting of selected from the group consisting of Addison's disease, allergies, ankylosing spondylitis, asthma, atherosclerosis, autoimmune diseases of the ear, autoimmune diseases of the eye, autoimmune hepatitis, autoimmune parotitis, colitis, coronary heart disease, Crohn's disease, diabetes, including Type 1 and/or Type 2 diabetes, epididymitis, glomerulonephritis, Graves' disease, Guillain-Barre syndrome, Hashimoto's disease, hemolytic anemia, idiopathic thrombocytopenic purpura, inflammatory bowel disease, immune response to recombinant drug products, systemic lupus erythematosus, male infertility, multiple sclerosis, myasthenia gravis, pemphigus, psoriasis, rheumatic fever, rheumatoid arthritis, sarcoidosis, scleroderma, Sjogren's syndrome, spondyloarthropathies, thyroiditis, transplant rejection, vasculitis, AIDS, atopic allergy, bronchial asthma, eczema, leprosy, schizophrenia, inherited depression, transplantation of tissues and organs, chronic fatigue syndrome, Alzheimer's disease, Parkinson's disease, myocardial infarction, stroke, autism, epilepsy, Arthus' phenomenon, anaphylaxis, alcohol addiction, and drug addiction.
